United States Patent Application Publication US 2026/0207734 A1 - sequence listing, part 2

SEQ ID NO: 10818 - protein, 9 aa, synthetic construct
  REGION 1..9: note = Description of Artificial Sequence: Synthetic peptide
NLWNTFTRL

SEQ ID NO: 10819 - protein, 9 aa, synthetic construct
  REGION 1..9: note = Description of Artificial Sequence: Synthetic peptide
NQTTTIQTI

SEQ ID NO: 10820 - protein, 9 aa, synthetic construct
  REGION 1..9: note = Description of Artificial Sequence: Synthetic peptide
NSKVQIGEY

SEQ ID NO: 10821 - protein, 9 aa, synthetic construct
  REGION 1..9: note = Description of Artificial Sequence: Synthetic peptide
NTLLFLMSF

SEQ ID NO: 10822 - protein, 10 aa, synthetic construct
  REGION 1..10: note = Description of Artificial Sequence: Synthetic peptide
NVFAFPFTIY

SEQ ID NO: 10823 - protein, 8 aa, synthetic construct
  REGION 1..8: note = Description of Artificial Sequence: Synthetic peptide
NVKDFMSL

SEQ ID NO: 10824 - protein, 9 aa, synthetic construct
  REGION 1..9: note = Description of Artificial Sequence: Synthetic peptide
NVPLHGTIL

SEQ ID NO: 10825 - protein, 9 aa, synthetic construct
  REGION 1..9: note = Description of Artificial Sequence: Synthetic peptide
NWITGGIAI

SEQ ID NO: 10826 - protein, 8 aa, synthetic construct
  REGION 1..8: note = Description of Artificial Sequence: Synthetic peptide
NYGDSATL

SEQ ID NO: 10827 - protein, 9 aa, synthetic construct
  REGION 1..9: note = Description of Artificial Sequence: Synthetic peptide
NYLKRRVVF

SEQ ID NO: 10828 - protein, 9 aa, synthetic construct
  REGION 1..9: note = Description of Artificial Sequence: Synthetic peptide
PQADVEWKF

SEQ ID NO: 10829 - protein, 9 aa, synthetic construct
  REGION 1..9: note = Description of Artificial Sequence: Synthetic peptide
QIITTDNTF

SEQ ID NO: 10830 - protein, 9 aa, synthetic construct
  REGION 1..9: note = Description of Artificial Sequence: Synthetic peptide
QLTPTWRVY

SEQ ID NO: 10831 - protein, 9 aa, synthetic construct
  REGION 1..9: note = Description of Artificial Sequence: Synthetic peptide
QVVDMSMTY

SEQ ID NO: 10832 - protein, 9 aa, synthetic construct
  REGION 1..9: note = Description of Artificial Sequence: Synthetic peptide
REFVFKNID

SEQ ID NO: 10833 - protein, 9 aa, synthetic construct
  REGION 1..9: note = Description of Artificial Sequence: Synthetic peptide
RELHLSWEV

SEQ ID NO: 10834 - protein, 9 aa, synthetic construct
  REGION 1..9: note = Description of Artificial Sequence: Synthetic peptide
REQIDGYVM

SEQ ID NO: 10835 - protein, 9 aa, synthetic construct
  REGION 1..9: note = Description of Artificial Sequence: Synthetic peptide
RKSAPLIEL

SEQ ID NO: 10836 - protein, 9 aa, synthetic construct
  REGION 1..9: note = Description of Artificial Sequence: Synthetic peptide
RSGETLGVL

SEQ ID NO: 10837 - protein, 8 aa, synthetic construct
  REGION 1..8: note = Description of Artificial Sequence: Synthetic peptide
RSIFSRTL

SEQ ID NO: 10838 - protein, 10 aa, synthetic construct
  REGION 1..10: note = Description of Artificial Sequence: Synthetic peptide
RTIAFGGCVF

SEQ ID NO: 10839 - protein, 8 aa, synthetic construct
  REGION 1..8: note = Description of Artificial Sequence: Synthetic peptide
RVDGQVDL

SEQ ID NO: 10840 - protein, 9 aa, synthetic construct
  REGION 1..9: note = Description of Artificial Sequence: Synthetic peptide
RVYSTGSNV

SEQ ID NO: 10841 - protein, 9 aa, synthetic construct
  REGION 1..9: note = Description of Artificial Sequence: Synthetic peptide
RYKLEGYAF

SEQ ID NO: 10842 - protein, 9 aa, synthetic construct
  REGION 1..9: note = Description of Artificial Sequence: Synthetic peptide
SAKNRARTV

SEQ ID NO: 10843 - protein, 8 aa, synthetic construct
  REGION 1..8: note = Description of Artificial Sequence: Synthetic peptide
SAKSASVY

SEQ ID NO: 10844 - protein, 9 aa, synthetic construct
  REGION 1..9: note = Description of Artificial Sequence: Synthetic peptide
SEHDYQIGG

SEQ ID NO: 10845 - protein, 9 aa, synthetic construct
  REGION 1..9: note = Description of Artificial Sequence: Synthetic peptide
SELLTPLGI

SEQ ID NO: 10846 - protein, 9 aa, synthetic construct
  REGION 1..9: note = Description of Artificial Sequence: Synthetic peptide
SEYTGNYQC

SEQ ID NO: 10847 - protein, 9 aa, synthetic construct
  REGION 1..9: note = Description of Artificial Sequence: Synthetic peptide
SFGPLVRKI

SEQ ID NO: 10848 - protein, 8 aa, synthetic construct
  REGION 1..8: note = Description of Artificial Sequence: Synthetic peptide
SFKELLVY

SEQ ID NO: 10849 - protein, 9 aa, synthetic construct
  REGION 1..9: note = Description of Artificial Sequence: Synthetic peptide
SFKWDLTAF

SEQ ID NO: 10850 - protein, 9 aa, synthetic construct
  REGION 1..9: note = Description of Artificial Sequence: Synthetic peptide
SGKPVPYCY

SEQ ID NO: 10851 - protein, 8 aa, synthetic construct
  REGION 1..8: note = Description of Artificial Sequence: Synthetic peptide
SLDTYPSL

SEQ ID NO: 10852 - protein, 9 aa, synthetic construct
  REGION 1..9: note = Description of Artificial Sequence: Synthetic peptide
SLPGVFCGV

SEQ ID NO: 10853 - protein, 9 aa, synthetic construct
  REGION 1..9: note = Description of Artificial Sequence: Synthetic peptide
SNYLKRRVV

SEQ ID NO: 10854 - protein, 9 aa, synthetic construct
  REGION 1..9: note = Description of Artificial Sequence: Synthetic peptide
SPYNSQNAV

SEQ ID NO: 10855 - protein, 8 aa, synthetic construct
  REGION 1..8: note = Description of Artificial Sequence: Synthetic peptide
SSDNIALL

SEQ ID NO: 10856 - protein, 8 aa, synthetic construct
  REGION 1..8: note = Description of Artificial Sequence: Synthetic peptide
SSVELKHF

SEQ ID NO: 10857 - protein, 9 aa, synthetic construct
  REGION 1..9: note = Description of Artificial Sequence: Synthetic peptide
STSAFVETV

SEQ ID NO: 10858 - protein, 9 aa, synthetic construct
  REGION 1..9: note = Description of Artificial Sequence: Synthetic peptide
SVCLGSLIY

SEQ ID NO: 10859 - protein, 9 aa, synthetic construct
  REGION 1..9: note = Description of Artificial Sequence: Synthetic peptide
SVSPKLFIR

SEQ ID NO: 10860 - protein, 8 aa, synthetic construct
  REGION 1..8: note = Description of Artificial Sequence: Synthetic peptide
SVVLLSVL

SEQ ID NO: 10861 - protein, 9 aa, synthetic construct
  REGION 1..9: note = Description of Artificial Sequence: Synthetic peptide
SYEDQDALF

SEQ ID NO: 10862 - protein, 9 aa, synthetic construct
  REGION 1..9: note = Description of Artificial Sequence: Synthetic peptide
SYFIASFRL

SEQ ID NO: 10863 - protein, 10 aa, synthetic construct
  REGION 1..10: note = Description of Artificial Sequence: Synthetic peptide
SYFIASFRLF

SEQ ID NO: 10864 - protein, 9 aa, synthetic construct
  REGION 1..9: note = Description of Artificial Sequence: Synthetic peptide
TAPHGHVMV

SEQ ID NO: 10865 - protein, 8 aa, synthetic construct
  REGION 1..8: note = Description of Artificial Sequence: Synthetic peptide
TAYANSVF

SEQ ID NO: 10866 - protein, 8 aa, synthetic construct
  REGION 1..8: note = Description of Artificial Sequence: Synthetic peptide
TEILPVSM

SEQ ID NO: 10867 - protein, 9 aa, synthetic construct
  REGION 1..9: note = Description of Artificial Sequence: Synthetic peptide
TEISFMLWC

SEQ ID NO: 10868 - protein, 10 aa, synthetic construct
  REGION 1..10: note = Description of Artificial Sequence: Synthetic peptide
TEVPANSTVL

SEQ ID NO: 10869 - protein, 9 aa, synthetic construct
  REGION 1..9: note = Description of Artificial Sequence: Synthetic peptide
TEVPVAIHA

SEQ ID NO: 10870 - protein, 8 aa, synthetic construct
  REGION 1..8: note = Description of Artificial Sequence: Synthetic peptide
TGVEHVTF

SEQ ID NO: 10871 - protein, 9 aa, synthetic construct
  REGION 1..9: note = Description of Artificial Sequence: Synthetic peptide
TLMNVLTLV

SEQ ID NO: 10872 - protein, 9 aa, synthetic construct
  REGION 1..9: note = Description of Artificial Sequence: Synthetic peptide
TLVTMPLGY

SEQ ID NO: 10873 - protein, 9 aa, synthetic construct
  REGION 1..9: note = Description of Artificial Sequence: Synthetic peptide
TSDLATNNL

SEQ ID NO: 10874 - protein, 9 aa, synthetic construct
  REGION 1..9: note = Description of Artificial Sequence: Synthetic peptide
TTDPSFLGR

SEQ ID NO: 10875 - protein, 9 aa, synthetic construct
  REGION 1..9: note = Description of Artificial Sequence: Synthetic peptide
TVEELKKLL

SEQ ID NO: 10876 - protein, 9 aa, synthetic construct
  REGION 1..9: note = Description of Artificial Sequence: Synthetic peptide
TVKNGSIHL

SEQ ID NO: 10877 - protein, 10 aa, synthetic construct
  REGION 1..10: note = Description of Artificial Sequence: Synthetic peptide
TVKNGSIHLY

SEQ ID NO: 10878 - protein, 9 aa, synthetic construct
  REGION 1..9: note = Description of Artificial Sequence: Synthetic peptide
TYLEGSVRV

SEQ ID NO: 10879 - protein, 10 aa, synthetic construct
  REGION 1..10: note = Description of Artificial Sequence: Synthetic peptide
VAAGLEAPFL

SEQ ID NO: 10880 - protein, 9 aa, synthetic construct
  REGION 1..9: note = Description of Artificial Sequence: Synthetic peptide
VAGGIVAIV

SEQ ID NO: 10881 - protein, 9 aa, synthetic construct
  REGION 1..9: note = Description of Artificial Sequence: Synthetic peptide
VAVKMFDAY

SEQ ID NO: 10882 - protein, 9 aa, synthetic construct
  REGION 1..9: note = Description of Artificial Sequence: Synthetic peptide
VAYRKVLLR

SEQ ID NO: 10883 - protein, 8 aa, synthetic construct
  REGION 1..8: note = Description of Artificial Sequence: Synthetic peptide
VEEVTTTL

SEQ ID NO: 10884 - protein, 9 aa, synthetic construct
  REGION 1..9: note = Description of Artificial Sequence: Synthetic peptide
VEIIKSQDL

SEQ ID NO: 10885 - protein, 9 aa, synthetic construct
  REGION 1..9: note = Description of Artificial Sequence: Synthetic peptide
VEKGVLPQL

SEQ ID NO: 10886 - protein, 9 aa, synthetic construct
  REGION 1..9: note = Description of Artificial Sequence: Synthetic peptide
VENPHLMGW

SEQ ID NO: 10887 - protein, 9 aa, synthetic construct
  REGION 1..9: note = Description of Artificial Sequence: Synthetic peptide
VLLAPLLSA

SEQ ID NO: 10888 - protein, 9 aa, synthetic construct
  REGION 1..9: note = Description of Artificial Sequence: Synthetic peptide
VMPLSAPTL

SEQ ID NO: 10889 - protein, 9 aa, synthetic construct
  REGION 1..9: note = Description of Artificial Sequence: Synthetic peptide
VPFVVSTGY

SEQ ID NO: 10890 - protein, 8 aa, synthetic construct
  REGION 1..8: note = Description of Artificial Sequence: Synthetic peptide
VPLNIIPL

SEQ ID NO: 10891 - protein, 8 aa, synthetic construct
  REGION 1..8: note = Description of Artificial Sequence: Synthetic peptide
VQAGNVQL

SEQ ID NO: 10892 - protein, 9 aa, synthetic construct
  REGION 1..9: note = Description of Artificial Sequence: Synthetic peptide
VRDVLVRGF

SEQ ID NO: 10893 - protein, 9 aa, synthetic construct
  REGION 1..9: note = Description of Artificial Sequence: Synthetic peptide
VRIKIVQML

SEQ ID NO: 10894 - protein, 9 aa, synthetic construct
  REGION 1..9: note = Description of Artificial Sequence: Synthetic peptide
VSDADSTLI

SEQ ID NO: 10895 - protein, 9 aa, synthetic construct
  REGION 1..9: note = Description of Artificial Sequence: Synthetic peptide
VSLVKPSFY

SEQ ID NO: 10896 - protein, 10 aa, synthetic construct
  REGION 1..10: note = Description of Artificial Sequence: Synthetic peptide
VSSPDAVTAY

SEQ ID NO: 10897 - protein, 10 aa, synthetic construct
  REGION 1..10: note = Description of Artificial Sequence: Synthetic peptide
VTPSGTWLTY

SEQ ID NO: 10898 - protein, 8 aa, synthetic construct
  REGION 1..8: note = Description of Artificial Sequence: Synthetic peptide
VVDSYYSL

SEQ ID NO: 10899 - protein, 9 aa, synthetic construct
  REGION 1..9: note = Description of Artificial Sequence: Synthetic peptide
VVFDEISMA

SEQ ID NO: 10900 - protein, 9 aa, synthetic construct
  REGION 1..9: note = Description of Artificial Sequence: Synthetic peptide
VYADSFVIR

SEQ ID NO: 10901 - protein, 9 aa, synthetic construct
  REGION 1..9: note = Description of Artificial Sequence: Synthetic peptide
VYANGGKGF

SEQ ID NO: 10902 - protein, 9 aa, synthetic construct
  REGION 1..9: note = Description of Artificial Sequence: Synthetic peptide
VYDDGARRV

SEQ ID NO: 10903 - protein, 9 aa, synthetic construct
  REGION 1..9: note = Description of Artificial Sequence: Synthetic peptide
VYNPFMIDV

SEQ ID NO: 10904 - protein, 8 aa, synthetic construct
  REGION 1..8: note = Description of Artificial Sequence: Synthetic peptide
VYRGTTTY

SEQ ID NO: 10905 - protein, 9 aa, synthetic construct
  REGION 1..9: note = Description of Artificial Sequence: Synthetic peptide
VYSTGSNVF

SEQ ID NO: 10906 - protein, 8 aa, synthetic construct
  REGION 1..8: note = Description of Artificial Sequence: Synthetic peptide
VYSVIYLY

SEQ ID NO: 10907 - protein, 9 aa, synthetic construct
  REGION 1..9: note = Description of Artificial Sequence: Synthetic peptide
VYSVIYLYL

SEQ ID NO: 10908 - protein, 9 aa, synthetic construct
  REGION 1..9: note = Description of Artificial Sequence: Synthetic peptide
WLDMVDTSL

SEQ ID NO: 10909 - protein, 9 aa, synthetic construct
  REGION 1..9: note = Description of Artificial Sequence: Synthetic peptide
WNLDYIINL

SEQ ID NO: 10910 - protein, 8 aa, synthetic construct
  REGION 1..8: note = Description of Artificial Sequence: Synthetic peptide
WPLIVTAL

SEQ ID NO: 10911 - protein, 9 aa, synthetic construct
  REGION 1..9: note = Description of Artificial Sequence: Synthetic peptide
YEDLLIRKS

SEQ ID NO: 10912 - protein, 9 aa, synthetic construct
  REGION 1..9: note = Description of Artificial Sequence: Synthetic peptide
YFTSDYYQL

SEQ ID NO: 10913 - protein, 9 aa, synthetic construct
  REGION 1..9: note = Description of Artificial Sequence: Synthetic peptide
YGIATVREV

SEQ ID NO: 10914 - protein, 8 aa, synthetic construct
  REGION 1..8: note = Description of Artificial Sequence: Synthetic peptide
YHDVRVVL

SEQ ID NO: 10915 - protein, 10 aa, synthetic construct
  REGION 1..10: note = Description of Artificial Sequence: Synthetic peptide
YIIKLIFLWL

SEQ ID NO: 10916 - protein, 9 aa, synthetic construct
  REGION 1..9: note = Description of Artificial Sequence: Synthetic peptide
YIINLIIKN

SEQ ID NO: 10917 - protein, 10 aa, synthetic construct
  REGION 1..10: note = Description of Artificial Sequence: Synthetic peptide
YIINLIIKNL

SEQ ID NO: 10918 - protein, 9 aa, synthetic construct
  REGION 1..9: note = Description of Artificial Sequence: Synthetic peptide
YKVYYGNAL

SEQ ID NO: 10919 - protein, 10 aa, synthetic construct
  REGION 1..10: note = Description of Artificial Sequence: Synthetic peptide
YLDGADVTKI

SEQ ID NO: 10920 - protein, 9 aa, synthetic construct
  REGION 1..9: note = Description of Artificial Sequence: Synthetic peptide
YLNTLTLAV

SEQ ID NO: 10921 - protein, 8 aa, synthetic construct
  REGION 1..8: note = Description of Artificial Sequence: Synthetic peptide
YLQPRTFL

SEQ ID NO: 10922 - protein, 8 aa, synthetic construct
  REGION 1..8: note = Description of Artificial Sequence: Synthetic peptide
YLYLTFYL

SEQ ID NO: 10923 - protein, 9 aa, synthetic construct
  REGION 1..9: note = Description of Artificial Sequence: Synthetic peptide
YPNASFDNF

SEQ ID NO: 10924 - protein, 9 aa, synthetic construct
  REGION 1..9: note = Description of Artificial Sequence: Synthetic peptide
YPSLETIQI

SEQ ID NO: 10925 - protein, 8 aa, synthetic construct
  REGION 1..8: note = Description of Artificial Sequence: Synthetic peptide
YRYNLPTM

SEQ ID NO: 10926 - protein, 9 aa, synthetic construct
  REGION 1..9: note = Description of Artificial Sequence: Synthetic peptide
YSGVVTTVM

SEQ ID NO: 10927 - protein, 9 aa, synthetic construct
  REGION 1..9: note = Description of Artificial Sequence: Synthetic peptide
YSSANNCTF

SEQ ID NO: 10928 - protein, 9 aa, synthetic construct
  REGION 1..9: note = Description of Artificial Sequence: Synthetic peptide
YTVEEAKTV

SEQ ID NO: 10929 - protein, 10 aa, synthetic construct
  REGION 1..10: note = Description of Artificial Sequence: Synthetic peptide
YVYIGDPAQL

SEQ ID NO: 10930 - protein, 9 aa, synthetic construct
  REGION 1..9: note = Description of Artificial Sequence: Synthetic peptide
YYHTTDPSF

SEQ ID NO: 10931 - protein, 9 aa, synthetic construct
  REGION 1..9: note = Description of Artificial Sequence: Synthetic peptide
YYPSARIVY

SEQ ID NO: 10932 - protein, 9 aa, synthetic construct
  REGION 1..9: note = Description of Artificial Sequence: Synthetic peptide
YYSLLMPIL

SEQ ID NO: 10933 - protein, 9 aa, synthetic construct
  REGION 1..9: note = Description of Artificial Sequence: Synthetic peptide
AAFHQECSL

SEQ ID NO: 10934 - protein, 9 aa, synthetic construct
  REGION 1..9: note = Description of Artificial Sequence: Synthetic peptide
AARVVRSIF

SEQ ID NO: 10935 - protein, 9 aa, synthetic construct
  REGION 1..9: note = Description of Artificial Sequence: Synthetic peptide
AEIRASANL

SEQ ID NO: 10936 - protein, 9 aa, synthetic construct
  REGION 1..9: note = Description of Artificial Sequence: Synthetic peptide
AEIVDTVSA

SEQ ID NO: 10937 - protein, 9 aa, synthetic construct
  REGION 1..9: note = Description of Artificial Sequence: Synthetic peptide
AEVQIDRLI

SEQ ID NO: 10938 - protein, 9 aa, synthetic construct
  REGION 1..9: note = Description of Artificial Sequence: Synthetic peptide
AGLEAPFLY

SEQ ID NO: 10939 - protein, 9 aa, synthetic construct
  REGION 1..9: note = Description of Artificial Sequence: Synthetic peptide
ALDISASIV

SEQ ID NO: 10940 - protein, 9 aa, synthetic construct
  REGION 1..9: note = Description of Artificial Sequence: Synthetic peptide
ALVYFLQSI

SEQ ID NO: 10941 - protein, 8 aa, synthetic construct
  REGION 1..8: note = Description of Artificial Sequence: Synthetic peptide
ASFDNFKF

SEQ ID NO: 10942 - protein, 9 aa, synthetic construct
  REGION 1..9: note = Description of Artificial Sequence: Synthetic peptide
ASLNGVTLI

SEQ ID NO: 10943 - protein, 9 aa, synthetic construct
  REGION 1..9: note = Description of Artificial Sequence: Synthetic peptide
AVLDMCASL

SEQ ID NO: 10944 - protein, 10 aa, synthetic construct
  REGION 1..10: note = Description of Artificial Sequence: Synthetic peptide
AVMYMGTLSY

SEQ ID NO: 10945 - protein, 9 aa, synthetic construct
  REGION 1..9: note = Description of Artificial Sequence: Synthetic peptide
CPAEIVDTV

SEQ ID NO: 10946 - protein, 9 aa, synthetic construct
  REGION 1..9: note = Description of Artificial Sequence: Synthetic peptide
CSFGGVSVI

SEQ ID NO: 10947 - protein, 9 aa, synthetic construct
  REGION 1..9: note = Description of Artificial Sequence: Synthetic peptide
DLDDFSKQL

SEQ ID NO: 10948 - protein, 9 aa, synthetic construct
  REGION 1..9: note = Description of Artificial Sequence: Synthetic peptide
DLFMRIFTI

SEQ ID NO: 10949 - protein, 9 aa, synthetic construct
  REGION 1..9: note = Description of Artificial Sequence: Synthetic peptide
DLTKGPHEF

SEQ ID NO: 10950 - protein, 9 aa, synthetic construct
  REGION 1..9: note = Description of Artificial Sequence: Synthetic peptide
DTVIEVQGY

SEQ ID NO: 10951 - protein, 9 aa, synthetic construct
  REGION 1..9: note = Description of Artificial Sequence: Synthetic peptide
DVLLPLTQY

SEQ ID NO: 10952 - protein, 9 aa, synthetic construct
  REGION 1..9: note = Description of Artificial Sequence: Synthetic peptide
EAARVVRSI

SEQ ID NO: 10953 - protein, 10 aa, synthetic construct
  REGION 1..10: note = Description of Artificial Sequence: Synthetic peptide
EAFEKMVSLL

SEQ ID NO: 10954 - protein, 9 aa, synthetic construct
  REGION 1..9: note = Description of Artificial Sequence: Synthetic peptide
EAFLIGCNY

SEQ ID NO: 10955 - protein, 9 aa, synthetic construct
  REGION 1..9: note = Description of Artificial Sequence: Synthetic peptide
EIAIILASF

SEQ ID NO: 10956 - protein, 9 aa, synthetic construct
  REGION 1..9: note = Description of Artificial Sequence: Synthetic peptide
ELDSFKEEL

SEQ ID NO: 10957 - protein, 9 aa, synthetic construct
  REGION 1..9: note = Description of Artificial Sequence: Synthetic peptide
ERSEKSYEL

SEQ ID NO: 10958 - protein, 9 aa, synthetic construct
  REGION 1..9: note = Description of Artificial Sequence: Synthetic peptide
ESLIDLQEL

SEQ ID NO: 10959 - protein, 9 aa, synthetic construct
  REGION 1..9: note = Description of Artificial Sequence: Synthetic peptide
ETISLAGSY

SEQ ID NO: 10960 - protein, 9 aa, synthetic construct
  REGION 1..9: note = Description of Artificial Sequence: Synthetic peptide
FADDLNQLT

SEQ ID NO: 10961 - protein, 9 aa, synthetic construct
  REGION 1..9: note = Description of Artificial Sequence: Synthetic peptide
FLAFLLFLV

SEQ ID NO: 10962 - protein, 9 aa, synthetic construct
  REGION 1..9: note = Description of Artificial Sequence: Synthetic peptide
FLLPSLATV

SEQ ID NO: 10963 - protein, 9 aa, synthetic construct
  REGION 1..9: note = Description of Artificial Sequence: Synthetic peptide
FLLVTLAIL

SEQ ID NO: 10964 - protein, 8 aa, synthetic construct
  REGION 1..8: note = Description of Artificial Sequence: Synthetic peptide
FLTENLLL

SEQ ID NO: 10965 - protein, 9 aa, synthetic construct
  REGION 1..9: note = Description of Artificial Sequence: Synthetic peptide
FLYIIKLIF

SEQ ID NO: 10966 - protein, 10 aa, synthetic construct
  REGION 1..10: note = Description of Artificial Sequence: Synthetic peptide
FLYIIKLIFL

SEQ ID NO: 10967 - protein, 9 aa, synthetic construct
  REGION 1..9: note = Description of Artificial Sequence: Synthetic peptide
FQVTIAEIL

SEQ ID NO: 10968 - protein, 9 aa, synthetic construct
  REGION 1..9: note = Description of Artificial Sequence: Synthetic peptide
FSAVGNICY

SEQ ID NO: 10969 - protein, 8 aa, synthetic construct
  REGION 1..8: note = Description of Artificial Sequence: Synthetic peptide
FTEERLKL

SEQ ID NO: 10970 - protein, 8 aa, synthetic construct
  REGION 1..8: note = Description of Artificial Sequence: Synthetic peptide
FTIKGSFL

SEQ ID NO: 10971 - protein, 8 aa, synthetic construct
  REGION 1..8: note = Description of Artificial Sequence: Synthetic peptide
FTIYSLLL

SEQ ID NO: 10972 - protein, 8 aa, synthetic construct
  REGION 1..8: note = Description of Artificial Sequence: Synthetic peptide
FVDGVPFV

SEQ ID NO: 10973 - protein, 9 aa, synthetic construct
  REGION 1..9: note = Description of Artificial Sequence: Synthetic peptide
FVKHKHAFL

SEQ ID NO: 10974 - protein, 8 aa, synthetic construct
  REGION 1..8: note = Description of Artificial Sequence: Synthetic peptide
FVNEFYAY

SEQ ID NO: 10975 - protein, 9 aa, synthetic construct
  REGION 1..9: note = Description of Artificial Sequence: Synthetic peptide
FVTVYSHLL

SEQ ID NO: 10976 - protein, 9 aa, synthetic construct
  REGION 1..9: note = Description of Artificial Sequence: Synthetic peptide
FYGGWHNML

SEQ ID NO: 10977 - protein, 9 aa, synthetic construct
  REGION 1..9: note = Description of Artificial Sequence: Synthetic peptide
FYLCFLAFL

SEQ ID NO: 10978 - protein, 9 aa, synthetic construct
  REGION 1..9: note = Description of Artificial Sequence: Synthetic peptide
FYLITPVHV

SEQ ID NO: 10979 - protein, 9 aa, synthetic construct
  REGION 1..9: note = Description of Artificial Sequence: Synthetic peptide
FYWFFSNYL

SEQ ID NO: 10980 - protein, 9 aa, synthetic construct
  REGION 1..9: note = Description of Artificial Sequence: Synthetic peptide
GDYGDAVVY

SEQ ID NO: 10981 - protein, 9 aa, synthetic construct
  REGION 1..9: note = Description of Artificial Sequence: Synthetic peptide
GETLPTEVL

SEQ ID NO: 10982 - protein, 8 aa, synthetic construct
  REGION 1..8: note = Description of Artificial Sequence: Synthetic peptide
GIVGVLTL

SEQ ID NO: 10983 - protein, 10 aa, synthetic construct
  REGION 1..10: note = Description of Artificial Sequence: Synthetic peptide
GQINDMILSL

SEQ ID NO: 10984 - protein, 9 aa, synthetic construct
  REGION 1..9: note = Description of Artificial Sequence: Synthetic peptide
GSIPCSVCL

SEQ ID NO: 10985 - protein, 9 aa, synthetic construct
  REGION 1..9: note = Description of Artificial Sequence: Synthetic peptide
GTYEGNSPF

SEQ ID NO: 10986 - protein, 9 aa, synthetic construct
  REGION 1..9: note = Description of Artificial Sequence: Synthetic peptide
HADQLTPTW

SEQ ID NO: 10987 - protein, 9 aa, synthetic construct
  REGION 1..9: note = Description of Artificial Sequence: Synthetic peptide
HEETIYNLL

SEQ ID NO: 10988 - protein, 9 aa, synthetic construct
  REGION 1..9: note = Description of Artificial Sequence: Synthetic peptide
HEIAWYTER

SEQ ID NO: 10989 - protein, 9 aa, synthetic construct
  REGION 1..9: note = Description of Artificial Sequence: Synthetic peptide
HEVLLAPLL

SEQ ID NO: 10990 - protein, 9 aa, synthetic construct
  REGION 1..9: note = Description of Artificial Sequence: Synthetic peptide
HHANEYRLY

SEQ ID NO: 10991 - protein, 9 aa, synthetic construct
  REGION 1..9: note = Description of Artificial Sequence: Synthetic peptide
HSQLGGLHL

SEQ ID NO: 10992 - protein, 9 aa, synthetic construct
  REGION 1..9: note = Description of Artificial Sequence: Synthetic peptide
HTIDGSSGV

SEQ ID NO: 10993 - protein, 9 aa, synthetic construct
  REGION 1..9: note = Description of Artificial Sequence: Synthetic peptide
HVMSKHTDF

SEQ ID NO: 10994 - protein, 9 aa, synthetic construct
  REGION 1..9: note = Description of Artificial Sequence: Synthetic peptide
IAKNTVKSV

SEQ ID NO: 10995 - protein, 8 aa, synthetic construct
  REGION 1..8: note = Description of Artificial Sequence: Synthetic peptide
IAQYTSAL

SEQ ID NO: 10996 - protein, 8 aa, synthetic construct
  REGION 1..8: note = Description of Artificial Sequence: Synthetic peptide
ICAPLTVF

SEQ ID NO: 10997 - protein, 9 aa, synthetic construct
  REGION 1..9: note = Description of Artificial Sequence: Synthetic peptide
IIKLIFLWL

SEQ ID NO: 10998 - protein, 8 aa, synthetic construct
  REGION 1..8: note = Description of Artificial Sequence: Synthetic peptide
ILDGISQY

SEQ ID NO: 10999 - protein, 9 aa, synthetic construct
  REGION 1..9: note = Description of Artificial Sequence: Synthetic peptide
ILLIIMRTF

SEQ ID NO: 11000 - protein, 9 aa, synthetic construct
  REGION 1..9: note = Description of Artificial Sequence: Synthetic peptide
ILMTARTVY

SEQ ID NO: 11001 - protein, 9 aa, synthetic construct
  REGION 1..9: note = Description of Artificial Sequence: Synthetic peptide
INITRFQTL

SEQ ID NO: 11002 - protein, 9 aa, synthetic construct
  REGION 1..9: note = Description of Artificial Sequence: Synthetic peptide
ISMDNSPNL

SEQ ID NO: 11003 - protein, 9 aa, synthetic construct
  REGION 1..9: note = Description of Artificial Sequence: Synthetic peptide
ISNEKQEIL

SEQ ID NO: 11004 - protein, 9 aa, synthetic construct
  REGION 1..9: note = Description of Artificial Sequence: Synthetic peptide
ISRQRLTKY

SEQ ID NO: 11005 - protein, 9 aa, synthetic construct
  REGION 1..9: note = Description of Artificial Sequence: Synthetic peptide
ITDAVDCAL

SEQ ID NO: 11006 - protein, 8 aa, synthetic construct
  REGION 1..8: note = Description of Artificial Sequence: Synthetic peptide
ITGGVVQL

SEQ ID NO: 11007 - protein, 9 aa, synthetic construct
  REGION 1..9: note = Description of Artificial Sequence: Synthetic peptide
IVDEPEEHV

SEQ ID NO: 11008 - protein, 8 aa, synthetic construct
  REGION 1..8: note = Description of Artificial Sequence: Synthetic peptide
IVNSVLLF

SEQ ID NO: 11009 - protein, 8 aa, synthetic construct
  REGION 1..8: note = Description of Artificial Sequence: Synthetic peptide
IWFLLLSV

SEQ ID NO: 11010 - protein, 9 aa, synthetic construct
  REGION 1..9: note = Description of Artificial Sequence: Synthetic peptide
KHITSKETL

SEQ ID NO: 11011 - protein, 9 aa, synthetic construct
  REGION 1..9: note = Description of Artificial Sequence: Synthetic peptide
KIFVDGVPF

SEQ ID NO: 11012 - protein, 9 aa, synthetic construct
  REGION 1..9: note = Description of Artificial Sequence: Synthetic peptide
KLAKKFDTF

SEQ ID NO: 11013 - protein, 9 aa, synthetic construct
  REGION 1..9: note = Description of Artificial Sequence: Synthetic peptide
KLLEQWNLV

SEQ ID NO: 11014 - protein, 9 aa, synthetic construct
  REGION 1..9: note = Description of Artificial Sequence: Synthetic peptide
KLWAQCVQL

SEQ ID NO: 11015 - protein, 8 aa, synthetic construct
  REGION 1..8: note = Description of Artificial Sequence: Synthetic peptide
KQLIKVTL

SEQ ID NO: 11016 - protein, 9 aa, synthetic construct
  REGION 1..9: note = Description of Artificial Sequence: Synthetic peptide
KSHNIALIW

SEQ ID NO: 11017 - protein, 9 aa, synthetic construct
  REGION 1..9: note = Description of Artificial Sequence: Synthetic peptide
KVSIWNLDY

SEQ ID NO: 11018 - protein, 8 aa, synthetic construct
  REGION 1..8: note = Description of Artificial Sequence: Synthetic peptide
LADNKFAL

SEQ ID NO: 11019 - protein, 8 aa, synthetic construct
  REGION 1..8: note = Description of Artificial Sequence: Synthetic peptide
LAIDAYPL

SEQ ID NO: 11020 - protein, 9 aa, synthetic construct
  REGION 1..9: note = Description of Artificial Sequence: Synthetic peptide
LANTCTERL

SEQ ID NO: 11021 - protein, 8 aa, synthetic construct
  REGION 1..8: note = Description of Artificial Sequence: Synthetic peptide
LAYYFMRF

SEQ ID NO: 11022 - protein, 8 aa, synthetic construct
  REGION 1..8: note = Description of Artificial Sequence: Synthetic peptide
LEAPFLYL

SEQ ID NO: 11023 - protein, 9 aa, synthetic construct
  REGION 1..9: note = Description of Artificial Sequence: Synthetic peptide
LEIKDTEKY

SEQ ID NO: 11024 - protein, 9 aa, synthetic construct
  REGION 1..9: note = Description of Artificial Sequence: Synthetic peptide
LFLAFVVFL

SEQ ID NO: 11025 - protein, 8 aa, synthetic construct
  REGION 1..8: note = Description of Artificial Sequence: Synthetic peptide
LFLALITL

SEQ ID NO: 11026 - protein, 8 aa, synthetic construct
  REGION 1..8: note = Description of Artificial Sequence: Synthetic peptide
LLFNKVTL

SEQ ID NO: 11027 - protein, 9 aa, synthetic construct
  REGION 1..9: note = Description of Artificial Sequence: Synthetic peptide
LLLLFVTVY

SEQ ID NO: 11028 - protein, 9 aa, synthetic construct
  REGION 1..9: note = Description of Artificial Sequence: Synthetic peptide
LMNVLTLVY

SEQ ID NO: 11029 - protein, 8 aa, synthetic construct
  REGION 1..8: note = Description of Artificial Sequence: Synthetic peptide
LPINVIVF

SEQ ID NO: 11030 - protein, 8 aa, synthetic construct
  REGION 1..8: note = Description of Artificial Sequence: Synthetic peptide
LTKGPHEF

SEQ ID NO: 11031 - protein, 8 aa, synthetic construct
  REGION 1..8: note = Description of Artificial Sequence: Synthetic peptide
LVIGAVIL

SEQ ID NO: 11032 - protein, 8 aa, synthetic construct
  REGION 1..8: note = Description of Artificial Sequence: Synthetic peptide
LVIGFLFL

SEQ ID NO: 11033 - protein, 8 aa, synthetic construct
  REGION 1..8: note = Description of Artificial Sequence: Synthetic peptide
LVNKFLAL

SEQ ID NO: 11034 - protein, 9 aa, synthetic construct
  REGION 1..9: note = Description of Artificial Sequence: Synthetic peptide
LYLQYIRKL

SEQ ID NO: 11035 - protein, 9 aa, synthetic construct
  REGION 1..9: note = Description of Artificial Sequence: Synthetic peptide
LYSPIFLIV

SEQ ID NO: 11036 - protein, 9 aa, synthetic construct
  REGION 1..9: note = Description of Artificial Sequence: Synthetic peptide
LYYPSARIV

SEQ ID NO: 11037 - protein, 9 aa, synthetic construct
  REGION 1..9: note = Description of Artificial Sequence: Synthetic peptide
MEIDFLELA

SEQ ID NO: 11038 - protein, 9 aa, synthetic construct
  REGION 1..9: note = Description of Artificial Sequence: Synthetic peptide
MFDAYVNTF

SEQ ID NO: 11039 - protein, 9 aa, synthetic construct
  REGION 1..9: note = Description of Artificial Sequence: Synthetic peptide
MIAQYTSAL

SEQ ID NO: 11040 - protein, 9 aa, synthetic construct
  REGION 1..9: note = Description of Artificial Sequence: Synthetic peptide
MMISAGFSL

SEQ ID NO: 11041 - protein, 8 aa, synthetic construct
  REGION 1..8: note = Description of Artificial Sequence: Synthetic peptide
MSFTVLCL

SEQ ID NO: 11042 - protein, 8 aa, synthetic construct
  REGION 1..8: note = Description of Artificial Sequence: Synthetic peptide
MYTPHTVL

SEQ ID NO: 11043 - protein, 9 aa, synthetic construct
  REGION 1..9: note = Description of Artificial Sequence: Synthetic peptide
NASFDNFKF

SEQ ID NO: 11044 - protein, 9 aa, synthetic construct
  REGION 1..9: note = Description of Artificial Sequence: Synthetic peptide
NESGLKTIL

SEQ ID NO: 11045 - protein, 9 aa, synthetic construct
  REGION 1..9: note = Description of Artificial Sequence: Synthetic peptide
NLCPFGEVF

SEQ ID NO: 11046 - protein, 9 aa, synthetic construct
  REGION 1..9: note = Description of Artificial Sequence: Synthetic peptide
NLDYIINLI

SEQ ID NO: 11047 - protein, 9 aa, synthetic construct
  REGION 1..9: note = Description of Artificial Sequence: Synthetic peptide
NLNESLIDL

SEQ ID NO: 11048 - protein, 9 aa, synthetic construct
  REGION 1..9: note = Description of Artificial Sequence: Synthetic peptide
NLVIGFLFL

SEQ ID NO: 11049 - protein, 8 aa, synthetic construct
  REGION 1..8: note = Description of Artificial Sequence: Synthetic peptide
NSHEGKTF

SEQ ID NO: 11050 - protein, 8 aa, synthetic construct
  REGION 1..8: note = Description of Artificial Sequence: Synthetic peptide
NSIDAFKL

SEQ ID NO: 11051 - protein, 9 aa, synthetic construct
  REGION 1..9: note = Description of Artificial Sequence: Synthetic peptide
NSVLLFLAF

SEQ ID NO: 11052 - protein, 9 aa, synthetic construct
  REGION 1..9: note = Description of Artificial Sequence: Synthetic peptide
NTSNQVAVL

SEQ ID NO: 11053 - protein, 9 aa, synthetic construct
  REGION 1..9: note = Description of Artificial Sequence: Synthetic peptide
PYPDPSRIL

SEQ ID NO: 11054 - protein, 9 aa, synthetic construct
  REGION 1..9: note = Description of Artificial Sequence: Synthetic peptide
QECVRGTTV

SEQ ID NO: 11055 - protein, 9 aa, synthetic construct
  REGION 1..9: note = Description of Artificial Sequence: Synthetic peptide
QKFNGLTVL

SEQ ID NO: 11056 - protein, 10 aa, synthetic construct
  REGION 1..10: note = Description of Artificial Sequence: Synthetic peptide
QSAPHGVVFL

SEQ ID NO: 11057 - protein, 8 aa, synthetic construct
  REGION 1..8: note = Description of Artificial Sequence: Synthetic peptide
REVRTIKV

SEQ ID NO: 11058 - protein, 8 aa, synthetic construct
  REGION 1..8: note = Description of Artificial Sequence: Synthetic peptide
RNAPRITF

SEQ ID NO: 11059 - protein, 9 aa, synthetic construct
  REGION 1..9: note = Description of Artificial Sequence: Synthetic peptide
RPDTRYVLM

SEQ ID NO: 11060 - protein, 8 aa, synthetic construct
  REGION 1..8: note = Description of Artificial Sequence: Synthetic peptide
RSDVLLPL

SEQ ID NO: 11061 - protein, 9 aa, synthetic construct
  REGION 1..9: note = Description of Artificial Sequence: Synthetic peptide
RSLKVPATV

SEQ ID NO: 11062 - protein, 8 aa, synthetic construct
  REGION 1..8: note = Description of Artificial Sequence: Synthetic peptide
RVDWTIEY

SEQ ID NO: 11063 - protein, 8 aa, synthetic construct
  REGION 1..8: note = Description of Artificial Sequence: Synthetic peptide
RVLGLKTL

SEQ ID NO: 11064 - protein, 9 aa, synthetic construct
  REGION 1..9: note = Description of Artificial Sequence: Synthetic peptide
RVWTLMNVL

SEQ ID NO: 11065 - protein, 8 aa, synthetic construct
  REGION 1..8: note = Description of Artificial Sequence: Synthetic peptide
SADAQSFL

SEQ ID NO: 11066 - protein, 9 aa, synthetic construct
  REGION 1..9: note = Description of Artificial Sequence: Synthetic peptide
SEAARVVRS

SEQ ID NO: 11067 - protein, 10 aa, synthetic construct
  REGION 1..10: note = Description of Artificial Sequence: Synthetic peptide
SEAARVVRSI

SEQ ID NO: 11068 - protein, 9 aa, synthetic construct
  REGION 1..9: note = Description of Artificial Sequence: Synthetic peptide
SELVIGAVI

SEQ ID NO: 11069 - protein, 8 aa, synthetic construct
  REGION 1..8: note = Description of Artificial Sequence: Synthetic peptide
SEVVLKKL

SEQ ID NO: 11070 - protein, 9 aa, synthetic construct
  REGION 1..9: note = Description of Artificial Sequence: Synthetic peptide
SFLPGVYSV

SEQ ID NO: 11071 - protein, 9 aa, synthetic construct
  REGION 1..9: note = Description of Artificial Sequence: Synthetic peptide
SFYYVWKSY

SEQ ID NO: 11072 - protein, 10 aa, synthetic construct
  REGION 1..10: note = Description of Artificial Sequence: Synthetic peptide
SHFAIGLALY

SEQ ID NO: 11073 - protein, 9 aa, synthetic construct
  REGION 1..9: note = Description of Artificial Sequence: Synthetic peptide
SLSSTASAL

SEQ ID NO: 11074 - protein, 9 aa, synthetic construct
  REGION 1..9: note = Description of Artificial Sequence: Synthetic peptide
SPIFLIVAA

SEQ ID NO: 11075 - protein, 9 aa, synthetic construct
  REGION 1..9: note = Description of Artificial Sequence: Synthetic peptide
SSGDATTAY

SEQ ID NO: 11076 - protein, 8 aa, synthetic construct
  REGION 1..8: note = Description of Artificial Sequence: Synthetic peptide
SSGVTREL

SEQ ID NO: 11077 - protein, 9 aa, synthetic construct
  REGION 1..9: note = Description of Artificial Sequence: Synthetic peptide
STDTGVEHV

SEQ ID NO: 11078 - protein, 9 aa, synthetic construct
  REGION 1..9: note = Description of Artificial Sequence: Synthetic peptide
STFNVPMEK

SEQ ID NO: 11079 - protein, 9 aa, synthetic construct
  REGION 1..9: note = Description of Artificial Sequence: Synthetic peptide
TAAKLMVVI

SEQ ID NO: 11080 - protein, 9 aa, synthetic construct
  REGION 1..9: note = Description of Artificial Sequence: Synthetic peptide
TCDGTTFTY

SEQ ID NO: 11081 - protein, 9 aa, synthetic construct
  REGION 1..9: note = Description of Artificial Sequence: Synthetic peptide
TCFSTQFAF

SEQ ID NO: 11082 - protein, 8 aa, synthetic construct
  REGION 1..8: note = Description of Artificial Sequence: Synthetic peptide
TEVLTEEV

SEQ ID NO: 11083 - protein, 9 aa, synthetic construct
  REGION 1..9: note = Description of Artificial Sequence: Synthetic peptide
TEVPANSTV

SEQ ID NO: 11084 - protein, 9 aa, synthetic construct
  REGION 1..9: note = Description of Artificial Sequence: Synthetic peptide
TIDYTEISF

SEQ ID NO: 11085 - protein, 8 aa, synthetic construct
  REGION 1..8: note = Description of Artificial Sequence: Synthetic peptide
TLMNVLTL

SEQ ID NO: 11086 - protein, 9 aa, synthetic construct
  REGION 1..9: note = Description of Artificial Sequence: Synthetic peptide
TLQPVSELL

SEQ ID NO: 11087 - protein, 9 aa, synthetic construct
  REGION 1..9: note = Description of Artificial Sequence: Synthetic peptide
TMCDIRQLL

SEQ ID NO: 11088 - protein, 9 aa, synthetic construct
  REGION 1..9: note = Description of Artificial Sequence: Synthetic peptide
TPHTVLQAV

SEQ ID NO: 11089 - protein, 9 aa, synthetic construct
  REGION 1..9: note = Description of Artificial Sequence: Synthetic peptide
TPINLVRDL

SEQ ID NO: 11090 - protein, 9 aa, synthetic construct
  REGION 1..9: note = Description of Artificial Sequence: Synthetic peptide
TPVVQTIEV

SEQ ID NO: 11091 - protein, 9 aa, synthetic construct
  REGION 1..9: note = Description of Artificial Sequence: Synthetic peptide
TRPLLESEL

SEQ ID NO: 11092 - protein, 8 aa, synthetic construct
  REGION 1..8: note = Description of Artificial Sequence: Synthetic peptide
TTYPGQGL

SEQ ID NO: 11093 - protein, 8 aa, synthetic construct
  REGION 1..8: note = Description of Artificial Sequence: Synthetic peptide
TVIEVQGY

SEQ ID NO: 11094 - protein, 9 aa, synthetic construct
  REGION 1..9: note = Description of Artificial Sequence: Synthetic peptide
TVVIGTSKF

SEQ ID NO: 11095 - protein, 9 aa, synthetic construct
  REGION 1..9: note = Description of Artificial Sequence: Synthetic peptide
TYFTQSRNL

SEQ ID NO: 11096 - protein, 8 aa, synthetic construct
  REGION 1..8: note = Description of Artificial Sequence: Synthetic peptide
VADYSVLY

SEQ ID NO: 11097 - protein, 9 aa, synthetic construct
  REGION 1..9: note = Description of Artificial Sequence: Synthetic peptide
VAELEGIQY

SEQ ID NO: 11098 - protein, 8 aa, synthetic construct
  REGION 1..8: note = Description of Artificial Sequence: Synthetic peptide
VATAEAEL

SEQ ID NO: 11099 - protein, 9 aa, synthetic construct
  REGION 1..9: note = Description of Artificial Sequence: Synthetic peptide
VENPTIQKD

SEQ ID NO: 11100 - protein, 8 aa, synthetic construct
  REGION 1..8: note = Description of Artificial Sequence: Synthetic peptide
VIYLYLTF

SEQ ID NO: 11101 - protein, 9 aa, synthetic construct
  REGION 1..9: note = Description of Artificial Sequence: Synthetic peptide
VLIMLIIFW

SEQ ID NO: 11102 - protein, 9 aa, synthetic construct
  REGION 1..9: note = Description of Artificial Sequence: Synthetic peptide
VLKGVKLHY

SEQ ID NO: 11103 - protein, 9 aa, synthetic construct
  REGION 1..9: note = Description of Artificial Sequence: Synthetic peptide
VLKKLKKSL

SEQ ID NO: 11104 - protein, 8 aa, synthetic construct
  REGION 1..8: note = Description of Artificial Sequence: Synthetic peptide
VLTEEVVL

SEQ ID NO: 11105 - protein, 9 aa, synthetic construct
  REGION 1..9: note = Description of Artificial Sequence: Synthetic peptide
VRSIFSRTL

SEQ ID NO: 11106 - protein, 8 aa, synthetic construct
  REGION 1..8: note = Description of Artificial Sequence: Synthetic peptide
VSNGTHWF

SEQ ID NO: 11107 - protein, 9 aa, synthetic construct
  REGION 1..9: note = Description of Artificial Sequence: Synthetic peptide
VSQPFLMDL

SEQ ID NO: 11108 - protein, 10 aa, synthetic construct
  REGION 1..10: note = Description of Artificial Sequence: Synthetic peptide
VVADAVIKTL

SEQ ID NO: 11109 - protein, 9 aa, synthetic construct
  REGION 1..9: note = Description of Artificial Sequence: Synthetic peptide
VVIGTSKFY

SEQ ID NO: 11110 - protein, 9 aa, synthetic construct
  REGION 1..9: note = Description of Artificial Sequence: Synthetic peptide
VVQQLPETY

SEQ ID NO: 11111 - protein, 9 aa, synthetic construct
  REGION 1..9: note = Description of Artificial Sequence: Synthetic peptide
VYFLQSINF

SEQ ID NO: 11112 - protein, 9 aa, synthetic construct
  REGION 1..9: note = Description of Artificial Sequence: Synthetic peptide
WRNTNPIQL

SEQ ID NO: 11113 - protein, 9 aa, synthetic construct
  REGION 1..9: note = Description of Artificial Sequence: Synthetic peptide
WTLMNVLTL

SEQ ID NO: 11114 - protein, 9 aa, synthetic construct
  REGION 1..9: note = Description of Artificial Sequence: Synthetic peptide
YAADPAMHA

SEQ ID NO: 11115 - protein, 9 aa, synthetic construct
  REGION 1..9: note = Description of Artificial Sequence: Synthetic peptide
YADSFVIRG

SEQ ID NO: 11116 - protein, 8 aa, synthetic construct
  REGION 1..8: note = Description of Artificial Sequence: Synthetic peptide
YANGGKGF

SEQ ID NO: 11117 - protein, 8 aa, synthetic construct
  REGION 1..8: note = Description of Artificial Sequence: Synthetic peptide
YCIDGALL

SEQ ID NO: 11118 - protein, 9 aa, synthetic construct
  REGION 1..9: note = Description of Artificial Sequence: Synthetic peptide
YFKYWDQTY

SEQ ID NO: 11119 - protein, 9 aa, synthetic construct
  REGION 1..9: note = Description of Artificial Sequence: Synthetic peptide
YHPNCVNCL

SEQ ID NO: 11120 - protein, 9 aa, synthetic construct
  REGION 1..9: note = Description of Artificial Sequence: Synthetic peptide
YIFFASFYY

SEQ ID NO: 11121 - protein, 8 aa, synthetic construct
  REGION 1..8: note = Description of Artificial Sequence: Synthetic peptide
YIIKLIFL

SEQ ID NO: 11122 - protein, 8 aa, synthetic construct
  REGION 1..8: note = Description of Artificial Sequence: Synthetic peptide
YLYALVYF

SEQ ID NO: 11123 - protein, 9 aa, synthetic construct
  REGION 1..9: note = Description of Artificial Sequence: Synthetic peptide
YQDVNCTEV

SEQ ID NO: 11124 - protein, 8 aa, synthetic construct
  REGION 1..8: note = Description of Artificial Sequence: Synthetic peptide
YRVVVLSF

SEQ ID NO: 11125 - protein, 9 aa, synthetic construct
  REGION 1..9: note = Description of Artificial Sequence: Synthetic peptide
YSTAALGVL

SEQ ID NO: 11126 - protein, 8 aa, synthetic construct
  REGION 1..8: note = Description of Artificial Sequence: Synthetic peptide
YTSNPTTF

SEQ ID NO: 11127 - protein, 9 aa, synthetic construct
  REGION 1..9: note = Description of Artificial Sequence: Synthetic peptide
YYQLYSTQL

SEQ ID NO: 11128 - protein, 9 aa, synthetic construct
  REGION 1..9: note = Description of Artificial Sequence: Synthetic peptide
YYRSLPGVF

SEQ ID NO: 11129 - protein, 8 aa, synthetic construct
  REGION 1..8: note = Description of Artificial Sequence: Synthetic peptide
AALALLLL

SEQ ID NO: 11130 - protein, 8 aa, synthetic construct
  REGION 1..8: note = Description of Artificial Sequence: Synthetic peptide
AEIPKEEV

SEQ ID NO: 11131 - protein, 9 aa, synthetic construct
  REGION 1..9: note = Description of Artificial Sequence: Synthetic peptide
AEWFLAYIL

SEQ ID NO: 11132 - protein, 9 aa, synthetic construct
  REGION 1..9: note = Description of Artificial Sequence: Synthetic peptide
AFPFTIYSL

SEQ ID NO: 11133 - protein, 9 aa, synthetic construct
  REGION 1..9: note = Description of Artificial Sequence: Synthetic peptide
AIFYLITPV

SEQ ID NO: 11134 - protein, 8 aa, synthetic construct
  REGION 1..8: note = Description of Artificial Sequence: Synthetic peptide
AVFDKNLY

SEQ ID NO: 11135 - protein, 9 aa, synthetic construct
  REGION 1..9: note = Description of Artificial Sequence: Synthetic peptide
AVKTQFNYY

SEQ ID NO: 11136 - protein, 9 aa, synthetic construct
  REGION 1..9: note = Description of Artificial Sequence: Synthetic peptide
AVTANVNAL

SEQ ID NO: 11137 - protein, 9 aa, synthetic construct
  REGION 1..9: note = Description of Artificial Sequence: Synthetic peptide
CTDDNALAY

SEQ ID NO: 11138 - protein, 8 aa, synthetic construct
  REGION 1..8: note = Description of Artificial Sequence: Synthetic peptide
CYFPLQSY

SEQ ID NO: 11139 - protein, 9 aa, synthetic construct
  REGION 1..9: note = Description of Artificial Sequence: Synthetic peptide
DFYLCFLAF

SEQ ID NO: 11140 - protein, 9 aa, synthetic construct
  REGION 1..9: note = Description of Artificial Sequence: Synthetic peptide
DTYPSLETI

SEQ ID NO: 11141 - protein, 9 aa, synthetic construct
  REGION 1..9: note = Description of Artificial Sequence: Synthetic peptide
EAIRHVRAW

SEQ ID NO: 11142 - protein, 9 aa, synthetic construct
  REGION 1..9: note = Description of Artificial Sequence: Synthetic peptide
EHFIETISL

SEQ ID NO: 11143 - protein, 9 aa, synthetic construct
  REGION 1..9: note = Description of Artificial Sequence: Synthetic peptide
EIVDTVSAL

SEQ ID NO: 11144 - protein, 9 aa, synthetic construct
  REGION 1..9: note = Description of Artificial Sequence: Synthetic peptide
ELDERIDKV

SEQ ID NO: 11145 - protein, 9 aa, synthetic construct
  REGION 1..9: note = Description of Artificial Sequence: Synthetic peptide
FAQDGNAAI

SEQ ID NO: 11146 - protein, 8 aa, synthetic construct
  REGION 1..8: note = Description of Artificial Sequence: Synthetic peptide
FATSACVL

SEQ ID NO: 11147 - protein, 10 aa, synthetic construct
  REGION 1..10: note = Description of Artificial Sequence: Synthetic peptide
FAYANRNRFL

SEQ ID NO: 11148 - protein, 9 aa, synthetic construct
  REGION 1..9: note = Description of Artificial Sequence: Synthetic peptide
FCNDPFLGV

SEQ ID NO: 11149 - protein, 8 aa, synthetic construct
  REGION 1..8: note = Description of Artificial Sequence: Synthetic peptide
FFITGNTL

SEQ ID NO: 11150 - protein, 8 aa, synthetic construct
  REGION 1..8: note = Description of Artificial Sequence: Synthetic peptide
FLAFLLFL

SEQ ID NO: 11151 - protein, 9 aa, synthetic construct
  REGION 1..9: note = Description of Artificial Sequence: Synthetic peptide
FLHFLPRVF

SEQ ID NO: 11152 - protein, 8 aa, synthetic construct
  REGION 1..8: note = Description of Artificial Sequence: Synthetic peptide
FLMSFTVL

SEQ ID NO: 11153 - protein, 8 aa, synthetic construct
  REGION 1..8: note = Description of Artificial Sequence: Synthetic peptide
FSSEIIGY

SEQ ID NO: 11154 - protein, 8 aa, synthetic construct
  REGION 1..8: note = Description of Artificial Sequence: Synthetic peptide
FTSDYYQL

SEQ ID NO: 11155 - protein, 8 aa, synthetic construct
  REGION 1..8: note = Description of Artificial Sequence: Synthetic peptide
FVAAIFYL

SEQ ID NO: 11156 - protein, 8 aa, synthetic construct
  REGION 1..8: note = Description of Artificial Sequence: Synthetic peptide
FVCNLLLL

SEQ ID NO: 11157 - protein, 9 aa, synthetic construct
  REGION 1..9: note = Description of Artificial Sequence: Synthetic peptide
FVFPLNSII

SEQ ID NO: 11158 - protein, 9 aa, synthetic construct
  REGION 1..9: note = Description of Artificial Sequence: Synthetic peptide
FVLTSHTVM

SEQ ID NO: 11159 - protein, 9 aa, synthetic construct
  REGION 1..9: note = Description of Artificial Sequence: Synthetic peptide
GAAAYYVGY

SEQ ID NO: 11160 - protein, 9 aa, synthetic construct
  REGION 1..9: note = Description of Artificial Sequence: Synthetic peptide
GLNDNLLEI

SEQ ID NO: 11161 - protein, 9 aa, synthetic construct
  REGION 1..9: note = Description of Artificial Sequence: Synthetic peptide
GRVDGQVDL

SEQ ID NO: 11162 - protein, 10 aa, synthetic construct
  REGION 1..10: note = Description of Artificial Sequence: Synthetic peptide
GSLPINVIVF

SEQ ID NO: 11163 - protein, 9 aa, synthetic construct
  REGION 1..9: note = Description of Artificial Sequence: Synthetic peptide
GVYDYLVST

SEQ ID NO: 11164 - protein, 8 aa, synthetic construct
  REGION 1..8: note = Description of Artificial Sequence: Synthetic peptide
HAEETRKL

SEQ ID NO: 11165 - protein, 8 aa, synthetic construct
  REGION 1..8: note = Description of Artificial Sequence: Synthetic peptide
HAFLCLFL

SEQ ID NO: 11166 - protein, 8 aa, synthetic construct
  REGION 1..8: note = Description of Artificial Sequence: Synthetic peptide
HFAIGLAL

SEQ ID NO: 11167 - protein, 8 aa, synthetic construct
  REGION 1..8: note = Description of Artificial Sequence: Synthetic peptide
HVVAFNTL

SEQ ID NO: 11168 - protein, 9 aa, synthetic construct
  REGION 1..9: note = Description of Artificial Sequence: Synthetic peptide
IAGLIAIVM

SEQ ID NO: 11169 - protein, 9 aa, synthetic construct
  REGION 1..9: note = Description of Artificial Sequence: Synthetic peptide
IEDLLFNKV

SEQ ID NO: 11170 - protein, 9 aa, synthetic construct
  REGION 1..9: note = Description of Artificial Sequence: Synthetic peptide
ILDITPCSF

SEQ ID NO: 11171 - protein, 10 aa, synthetic construct
  REGION 1..10: note = Description of Artificial Sequence: Synthetic peptide
ISAGFSLWVY

SEQ ID NO: 11172 - protein, 9 aa, synthetic construct
  REGION 1..9: note = Description of Artificial Sequence: Synthetic peptide
ITVATSRTL

SEQ ID NO: 11173 - protein, 10 aa, synthetic construct
  REGION 1..10: note = Description of Artificial Sequence: Synthetic peptide
IVAAIVFITL

SEQ ID NO: 11174 - protein, 8 aa, synthetic construct
  REGION 1..8: note = Description of Artificial Sequence: Synthetic peptide
IVDTVSAL

SEQ ID NO: 11175 - protein, 9 aa, synthetic construct
  REGION 1..9: note = Description of Artificial Sequence: Synthetic peptide
KFKEGVEFL

SEQ ID NO: 11176 - protein, 9 aa, synthetic construct
  REGION 1..9: note = Description of Artificial Sequence: Synthetic peptide
KHADFDTWF

SEQ ID NO: 11177 - protein, 9 aa, synthetic construct
  REGION 1..9: note = Description of Artificial Sequence: Synthetic peptide
KLHDELTGH

SEQ ID NO: 11178 - protein, 9 aa, synthetic construct
  REGION 1..9: note = Description of Artificial Sequence: Synthetic peptide
KLIFLWLLW

SEQ ID NO: 11179 - protein, 10 aa, synthetic construct
  REGION 1..10: note = Description of Artificial Sequence: Synthetic peptide
KLINIIIWFL

SEQ ID NO: 11180 - protein, 9 aa, synthetic construct
  REGION 1..9: note = Description of Artificial Sequence: Synthetic peptide
KLNIKLLGV

SEQ ID NO: 11181 - protein, 9 aa, synthetic construct
  REGION 1..9: note = Description of Artificial Sequence: Synthetic peptide
KLSYGIATV

SEQ ID NO: 11182 - protein, 9 aa, synthetic construct
  REGION 1..9: note = Description of Artificial Sequence: Synthetic peptide
KSYELQTPF

SEQ ID NO: 11183 - protein, 9 aa, synthetic construct
  REGION 1..9: note = Description of Artificial Sequence: Synthetic peptide
KVATVQSKM

SEQ ID NO: 11184 - protein, 9 aa, synthetic construct
  REGION 1..9: note = Description of Artificial Sequence: Synthetic peptide
LAKDTTEAF

SEQ ID NO: 11185 - protein, 9 aa, synthetic construct
  REGION 1..9: note = Description of Artificial Sequence: Synthetic peptide
LAMDEFIER

SEQ ID NO: 11186 - protein, 9 aa, synthetic construct
  REGION 1..9: note = Description of Artificial Sequence: Synthetic peptide
LATNNLVVM

SEQ ID NO: 11187 - protein, 9 aa, synthetic construct
  REGION 1..9: note = Description of Artificial Sequence: Synthetic peptide
LNNDYYRSL

SEQ ID NO: 11188 - protein, 9 aa, synthetic construct
  REGION 1..9: note = Description of Artificial Sequence: Synthetic peptide
LPFFSNVTW

SEQ ID NO: 11189 - protein, 9 aa, synthetic construct
  REGION 1..9: note = Description of Artificial Sequence: Synthetic peptide
LPVNVAFEL

SEQ ID NO: 11190 - protein, 9 aa, synthetic construct
  REGION 1..9: note = Description of Artificial Sequence: Synthetic peptide
LVDSDLNDF

SEQ ID NO: 11191 - protein, 9 aa, synthetic construct
  REGION 1..9: note = Description of Artificial Sequence: Synthetic peptide
LVQAGNVQL

SEQ ID NO: 11192 - protein, 9 aa, synthetic construct
  REGION 1..9: note = Description of Artificial Sequence: Synthetic peptide
LYDKLVSSF

SEQ ID NO: 11193 - protein, 9 aa, synthetic construct
  REGION 1..9: note = Description of Artificial Sequence: Synthetic peptide
MLFTMLRKL

SEQ ID NO: 11194 - protein, 9 aa, synthetic construct
  REGION 1..9: note = Description of Artificial Sequence: Synthetic peptide
MLIIFWFSL

SEQ ID NO: 11195 - protein, 9 aa, synthetic construct
  REGION 1..9: note = Description of Artificial Sequence: Synthetic peptide
MVDTSLSGF

SEQ ID NO: 11196 - protein, 9 aa, synthetic construct
  REGION 1..9: note = Description of Artificial Sequence: Synthetic peptide
NASSSEAFL

SEQ ID NO: 11197 - protein, 9 aa, synthetic construct
  REGION 1..9: note = Description of Artificial Sequence: Synthetic peptide
NELSRVLGL

SEQ ID NO: 11198 - protein, 9 aa, synthetic construct
  REGION 1..9: note = Description of Artificial Sequence: Synthetic peptide
NFKDQVILL

SEQ ID NO: 11199 - protein, 9 aa, synthetic construct
  REGION 1..9: note = Description of Artificial Sequence: Synthetic peptide
NLSDRVVFV

SEQ ID NO: 11200 - protein, 10 aa, synthetic construct
  REGION 1..10: note = Description of Artificial Sequence: Synthetic peptide
NLYDKLVSSF

SEQ ID NO: 11201 - protein, 9 aa, synthetic construct
  REGION 1..9: note = Description of Artificial Sequence: Synthetic peptide
NNAAIVLQL

SEQ ID NO: 11202 - protein, 9 aa, synthetic construct
  REGION 1..9: note = Description of Artificial Sequence: Synthetic peptide
NRFLYIIKL

SEQ ID NO: 11203 - protein, 9 aa, synthetic construct
  REGION 1..9: note = Description of Artificial Sequence: Synthetic peptide
NRFNVAITR

SEQ ID NO: 11204 - protein, 9 aa, synthetic construct
  REGION 1..9: note = Description of Artificial Sequence: Synthetic peptide
QAWQPGVAM

SEQ ID NO: 11205 - protein, 9 aa, synthetic construct
  REGION 1..9: note = Description of Artificial Sequence: Synthetic peptide
QEILGTVSW

SEQ ID NO: 11206 - protein, 9 aa, synthetic construct
  REGION 1..9: note = Description of Artificial Sequence: Synthetic peptide
QLIKVTLVF

SEQ ID NO: 11207 - protein, 9 aa, synthetic construct
  REGION 1..9: note = Description of Artificial Sequence: Synthetic peptide
QLYLGGMSY

SEQ ID NO: 11208 - protein, 8 aa, synthetic construct
  REGION 1..8: note = Description of Artificial Sequence: Synthetic peptide
QPYRVVVL

SEQ ID NO: 11209 - protein, 9 aa, synthetic construct
  REGION 1..9: note = Description of Artificial Sequence: Synthetic peptide
QSADAQSFL

SEQ ID NO: 11210 - protein, 8 aa, synthetic construct
  REGION 1..8: note = Description of Artificial Sequence: Synthetic peptide
QTIEVNSF

SEQ ID NO: 11211 - protein, 9 aa, synthetic construct
  REGION 1..9: note = Description of Artificial Sequence: Synthetic peptide
RIIPARARV

SEQ ID NO: 11212 - protein, 9 aa, synthetic construct
  REGION 1..9: note = Description of Artificial Sequence: Synthetic peptide
RLFARTRSM

SEQ ID NO: 11213 - protein, 10 aa, synthetic construct
  REGION 1..10: note = Description of Artificial Sequence: Synthetic peptide
RLITGRLQSL

SEQ ID NO: 11214 - protein, 9 aa, synthetic construct
  REGION 1..9: note = Description of Artificial Sequence: Synthetic peptide
RQEEVQELY

SEQ ID NO: 11215 - protein, 9 aa, synthetic construct
  REGION 1..9: note = Description of Artificial Sequence: Synthetic peptide
RQWLPTGTL

SEQ ID NO: 11216 - protein, 10 aa, synthetic construct
  REGION 1..10: note = Description of Artificial Sequence: Synthetic peptide
RTTNGDFLHF

SEQ ID NO: 11217 - protein, 9 aa, synthetic construct
  REGION 1..9: note = Description of Artificial Sequence: Synthetic peptide
RVVVLSFEL

SEQ ID NO: 11218 - protein, 10 aa, synthetic construct
  REGION 1..10: note = Description of Artificial Sequence: Synthetic peptide
RVYSTGSNVF

SEQ ID NO: 11219 - protein, 9 aa, synthetic construct
  REGION 1..9: note = Description of Artificial Sequence: Synthetic peptide
RYLALYNKY

SEQ ID NO: 11220 - protein, 9 aa, synthetic construct
  REGION 1..9: note = Description of Artificial Sequence: Synthetic peptide
SAGFSLWVY

SEQ ID NO: 11221 - protein, 9 aa, synthetic construct
  REGION 1..9: note = Description of Artificial Sequence: Synthetic peptide
SASVYYSQL

SEQ ID NO: 11222 - protein, 9 aa, synthetic construct
  REGION 1..9: note = Description of Artificial Sequence: Synthetic peptide
SEYDYVIFT

SEQ ID NO: 11223 - protein, 9 aa, synthetic construct
  REGION 1..9: note = Description of Artificial Sequence: Synthetic peptide
SIKNFKSVL

SEQ ID NO: 11224 - protein, 9 aa, synthetic construct
  REGION 1..9: note = Description of Artificial Sequence: Synthetic peptide
SLINTLNDL

SEQ ID NO: 11225 - protein, 9 aa, synthetic construct
  REGION 1..9: note = Description of Artificial Sequence: Synthetic peptide
SLYVNKHAF

SEQ ID NO: 11226 - protein, 9 aa, synthetic construct
  REGION 1..9: note = Description of Artificial Sequence: Synthetic peptide
SNFGAISSV

SEQ ID NO: 11227 - protein, 10 aa, synthetic construct
  REGION 1..10: note = Description of Artificial Sequence: Synthetic peptide
SSFKWDLTAF

SEQ ID NO: 11228 - protein, 9 aa, synthetic construct
  REGION 1..9: note = Description of Artificial Sequence: Synthetic peptide
SSRLSFKEL

SEQ ID NO: 11229 - protein, 9 aa, synthetic construct
  REGION 1..9: note = Description of Artificial Sequence: Synthetic peptide
STAALGVLM

SEQ ID NO: 11230 - protein, 9 aa, synthetic construct
  REGION 1..9: note = Description of Artificial Sequence: Synthetic peptide
STFEEAALC

SEQ ID NO: 11231 - protein, 9 aa, synthetic construct
  REGION 1..9: note = Description of Artificial Sequence: Synthetic peptide
STKHFYWFF

SEQ ID NO: 11232 - protein, 9 aa, synthetic construct
  REGION 1..9: note = Description of Artificial Sequence: Synthetic peptide
SVFNICQAV

SEQ ID NO: 11233 - protein, 9 aa, synthetic construct
  REGION 1..9: note = Description of Artificial Sequence: Synthetic peptide
SYIVDSVTV

SEQ ID NO: 11234 - protein, 8 aa, synthetic construct
  REGION 1..8: note = Description of Artificial Sequence: Synthetic peptide
TASWFTAL

SEQ ID NO: 11235 - protein, 9 aa, synthetic construct
  REGION 1..9: note = Description of Artificial Sequence: Synthetic peptide
TEVVGDIIL

SEQ ID NO: 11236 - protein, 9 aa, synthetic construct
  REGION 1..9: note = Description of Artificial Sequence: Synthetic peptide
TFFKLVNKF

SEQ ID NO: 11237 - protein, 8 aa, synthetic construct
  REGION 1..8: note = Description of Artificial Sequence: Synthetic peptide
TGYHFREL

SEQ ID NO: 11238 - protein, 9 aa, synthetic construct
  REGION 1..9: note = Description of Artificial Sequence: Synthetic peptide
TPFEIKLAK

SEQ ID NO: 11239 - protein, 9 aa, synthetic construct
  REGION 1..9: note = Description of Artificial Sequence: Synthetic peptide
TPKGPKVKY

SEQ ID NO: 11240 - protein, 9 aa, synthetic construct
  REGION 1..9: note = Description of Artificial Sequence: Synthetic peptide
TRFQTLLAL

SEQ ID NO: 11241 - protein, 9 aa, synthetic construct
  REGION 1..9: note = Description of Artificial Sequence: Synthetic peptide
TSVVLLSVL

SEQ ID NO: 11242 - protein, 8 aa, synthetic construct
  REGION 1..8: note = Description of Artificial Sequence: Synthetic peptide
TTIKPVTY

SEQ ID NO: 11243 - protein, 9 aa, synthetic construct
  REGION 1..9: note = Description of Artificial Sequence: Synthetic peptide
TTKGGRFVL

SEQ ID NO: 11244 - protein, 9 aa, synthetic construct
  REGION 1..9: note = Description of Artificial Sequence: Synthetic peptide
TVEEAKTVL

SEQ ID NO: 11245 - protein, 9 aa, synthetic construct
  REGION 1..9: note = Description of Artificial Sequence: Synthetic peptide
TVNVLAWLY

SEQ ID NO: 11246 - protein, 9 aa, synthetic construct
  REGION 1..9: note = Description of Artificial Sequence: Synthetic peptide
TVYDDGARR

SEQ ID NO: 11247 - protein, 10 aa, synthetic construct
  REGION 1..10: note = Description of Artificial Sequence: Synthetic peptide
TVYDPLQPEL

SEQ ID NO: 11248 - protein, 9 aa, synthetic construct
  REGION 1..9: note = Description of Artificial Sequence: Synthetic peptide
VAAGLEAPF

SEQ ID NO: 11249 - protein, 9 aa, synthetic construct
  REGION 1..9: note = Description of Artificial Sequence: Synthetic peptide
VAKNLNESL

SEQ ID NO: 11250 - protein, 9 aa, synthetic construct
  REGION 1..9: note = Description of Artificial Sequence: Synthetic peptide
VCINGLMLL

SEQ ID NO: 11251 - protein, 9 aa, synthetic construct
  REGION 1..9: note = Description of Artificial Sequence: Synthetic peptide
VGYLQPRTF

SEQ ID NO: 11252 - protein, 9 aa, synthetic construct
  REGION 1..9: note = Description of Artificial Sequence: Synthetic peptide
VLDWLEEKF

SEQ ID NO: 11253 - protein, 8 aa, synthetic construct
  REGION 1..8: note = Description of Artificial Sequence: Synthetic peptide
VLLPLTQY

SEQ ID NO: 11254 - protein, 9 aa, synthetic construct
  REGION 1..9: note = Description of Artificial Sequence: Synthetic peptide
VLYENQKLI

SEQ ID NO: 11255 - protein, 9 aa, synthetic construct
  REGION 1..9: note = Description of Artificial Sequence: Synthetic peptide
VPWDTIANY

SEQ ID NO: 11256 - protein, 8 aa, synthetic construct
  REGION 1..8: note = Description of Artificial Sequence: Synthetic peptide
VSDADSTL

SEQ ID NO: 11257 - protein, 9 aa, synthetic construct
  REGION 1..9: note = Description of Artificial Sequence: Synthetic peptide
VSDIDYVPL

SEQ ID NO: 11258 - protein, 9 aa, synthetic construct
  REGION 1..9: note = Description of Artificial Sequence: Synthetic peptide
VTANVNALL

SEQ ID NO: 11259 - protein, 9 aa, synthetic construct
  REGION 1..9: note = Description of Artificial Sequence: Synthetic peptide
VTVYSHLLL

SEQ ID NO: 11260 - protein, 9 aa, synthetic construct
  REGION 1..9: note = Description of Artificial Sequence: Synthetic peptide
VVAIDYKHY

SEQ ID NO: 11261 - protein, 9 aa, synthetic construct
  REGION 1..9: note = Description of Artificial Sequence: Synthetic peptide
VVDSYYSLL

SEQ ID NO: 11262 - protein, 8 aa, synthetic construct
  REGION 1..8: note = Description of Artificial Sequence: Synthetic peptide
VVFLHVTY

SEQ ID NO: 11263 - protein, 9 aa, synthetic construct
  REGION 1..9: note = Description of Artificial Sequence: Synthetic peptide
WLIVGVALL

SEQ ID NO: 11264 - protein, 9 aa, synthetic construct
  REGION 1..9: note = Description of Artificial Sequence: Synthetic peptide
WLMWLIINL

SEQ ID NO: 11265 - protein, 9 aa, synthetic construct
  REGION 1..9: note = Description of Artificial Sequence: Synthetic peptide
WTAGAAAYY

SEQ ID NO: 11266 - protein, 8 aa, synthetic construct
  REGION 1..8: note = Description of Artificial Sequence: Synthetic peptide
YANRNRFL

SEQ ID NO: 11267 - protein, 9 aa, synthetic construct
  REGION 1..9: note = Description of Artificial Sequence: Synthetic peptide
YANRNRFLY

SEQ ID NO: 11268 - protein, 9 aa, synthetic construct
  REGION 1..9: note = Description of Artificial Sequence: Synthetic peptide
YCNKTVGEL

SEQ ID NO: 11269 - protein, 9 aa, synthetic construct
  REGION 1..9: note = Description of Artificial Sequence: Synthetic peptide
YENFNQHEV

SEQ ID NO: 11270 - protein, 9 aa, synthetic construct
  REGION 1..9: note = Description of Artificial Sequence: Synthetic peptide
YGDFSHSQL

SEQ ID NO: 11271 - protein, 9 aa, synthetic construct
  REGION 1..9: note = Description of Artificial Sequence: Synthetic peptide
YLNSTNVTI

SEQ ID NO: 11272 - protein, 9 aa, synthetic construct
  REGION 1..9: note = Description of Artificial Sequence: Synthetic peptide
YLTNDVSFL

SEQ ID NO: 11273 - protein, 9 aa, synthetic construct
  REGION 1..9: note = Description of Artificial Sequence: Synthetic peptide
YMPYFFTLL

SEQ ID NO: 11274 - protein, 9 aa, synthetic construct
  REGION 1..9: note = Description of Artificial Sequence: Synthetic peptide
YPLECIKDL

SEQ ID NO: 11275 - protein, 9 aa, synthetic construct
  REGION 1..9: note = Description of Artificial Sequence: Synthetic peptide
YSDVENPHL

SEQ ID NO: 11276 - protein, 9 aa, synthetic construct
  REGION 1..9: note = Description of Artificial Sequence: Synthetic peptide
YSKHTPINL

SEQ ID NO: 11277 - protein, 9 aa, synthetic construct
  REGION 1..9: note = Description of Artificial Sequence: Synthetic peptide
YTNDKACPL

SEQ ID NO: 11278 - protein, 9 aa, synthetic construct
  REGION 1..9: note = Description of Artificial Sequence: Synthetic peptide
YVRNLQHRL

SEQ ID NO: 11279 - protein, 8 aa, synthetic construct
  REGION 1..8: note = Description of Artificial Sequence: Synthetic peptide
AASGNLLL

SEQ ID NO: 11280 - protein, 9 aa, synthetic construct
  REGION 1..9: note = Description of Artificial Sequence: Synthetic peptide
AIMQLFFSY

SEQ ID NO: 11281 - protein, 9 aa, synthetic construct
  REGION 1..9: note = Description of Artificial Sequence: Synthetic peptide
ALYNKYKYF

SEQ ID NO: 11282 - protein, 9 aa, synthetic construct
  REGION 1..9: note = Description of Artificial Sequence: Synthetic peptide
ANGDSEVVL

SEQ ID NO: 11283 - protein, 8 aa, synthetic construct
  REGION 1..8: note = Description of Artificial Sequence: Synthetic peptide
AQNSVRVL

SEQ ID NO: 11284 - protein, 9 aa, synthetic construct
  REGION 1..9: note = Description of Artificial Sequence: Synthetic peptide
ASFDNFKFV

SEQ ID NO: 11285 - protein, 9 aa, synthetic construct
  REGION 1..9: note = Description of Artificial Sequence: Synthetic peptide
ASLPFGWLI

SEQ ID NO: 11286 - protein, 9 aa, synthetic construct
  REGION 1..9: note = Description of Artificial Sequence: Synthetic peptide
ATLPKGIMM

SEQ ID NO: 11287 - protein, 9 aa, synthetic construct
  REGION 1..9: note = Description of Artificial Sequence: Synthetic peptide
AVINGDRWF

SEQ ID NO: 11288 - protein, 9 aa, synthetic construct
  REGION 1..9: note = Description of Artificial Sequence: Synthetic peptide
DLNETLVTM

SEQ ID NO: 11289 - protein, 9 aa, synthetic construct
  REGION 1..9: note = Description of Artificial Sequence: Synthetic peptide
EPVLKGVKL

SEQ ID NO: 11290 - protein, 9 aa, synthetic construct
  REGION 1..9: note = Description of Artificial Sequence: Synthetic peptide
ETTADIVVF

SEQ ID NO: 11291 - protein, 9 aa, synthetic construct
  REGION 1..9: note = Description of Artificial Sequence: Synthetic peptide
FACPDGVKH

SEQ ID NO: 11292 - protein, 8 aa, synthetic construct
  REGION 1..8: note = Description of Artificial Sequence: Synthetic peptide
FAIGLALY

SEQ ID NO: 11293 - protein, 9 aa, synthetic construct
  REGION 1..9: note = Description of Artificial Sequence: Synthetic peptide
FAYTKRNVI

SEQ ID NO: 11294 - protein, 9 aa, synthetic construct
  REGION 1..9: note = Description of Artificial Sequence: Synthetic peptide
FFSYFAVHF

SEQ ID NO: 11295 - protein, 8 aa, synthetic construct
  REGION 1..8: note = Description of Artificial Sequence: Synthetic peptide
FLAFVVFL

SEQ ID NO: 11296 - protein, 10 aa, synthetic construct
  REGION 1..10: note = Description of Artificial Sequence: Synthetic peptide
FLWLLWPVTL

SEQ ID NO: 11297 - protein, 8 aa, synthetic construct
  REGION 1..8: note = Description of Artificial Sequence: Synthetic peptide
FLYENAFL

SEQ ID NO: 11298 - protein, 9 aa, synthetic construct
  REGION 1..9: note = Description of Artificial Sequence: Synthetic peptide
FNPETNILL

SEQ ID NO: 11299 - protein, 9 aa, synthetic construct
  REGION 1..9: note = Description of Artificial Sequence: Synthetic peptide
FSLWVYKQF

SEQ ID NO: 11300 - protein, 9 aa, synthetic construct
  REGION 1..9: note = Description of Artificial Sequence: Synthetic peptide
FSYFAVHFI

SEQ ID NO: 11301 - protein, 9 aa, synthetic construct
  REGION 1..9: note = Description of Artificial Sequence: Synthetic peptide
FVFKNIDGY

SEQ ID NO: 11302 - protein, 9 aa, synthetic construct
  REGION 1..9: note = Description of Artificial Sequence: Synthetic peptide
GGAPTKVTF

SEQ ID NO: 11303 - protein, 9 aa, synthetic construct
  REGION 1..9: note = Description of Artificial Sequence: Synthetic peptide
GLFCLLNRY

SEQ ID NO: 11304 - protein, 9 aa, synthetic construct
  REGION 1..9: note = Description of Artificial Sequence: Synthetic peptide
GVVFLHVTY

SEQ ID NO: 11305 - protein, 9 aa, synthetic construct
  REGION 1..9: note = Description of Artificial Sequence: Synthetic peptide
GYKSVNITF

SEQ ID NO: 11306 - protein, 9 aa, synthetic construct
  REGION 1..9: note = Description of Artificial Sequence: Synthetic peptide
HLKDGTCGL

SEQ ID NO: 11307 - protein, 9 aa, synthetic construct
  REGION 1..9: note = Description of Artificial Sequence: Synthetic peptide
IAIVMVTIM

SEQ ID NO: 11308 - protein, 9 aa, synthetic construct
  REGION 1..9: note = Description of Artificial Sequence: Synthetic peptide
IANYAKPFL

SEQ ID NO: 11309 - protein, 9 aa, synthetic construct
  REGION 1..9: note = Description of Artificial Sequence: Synthetic peptide
IFFITGNTL

SEQ ID NO: 11310 - protein, 9 aa, synthetic construct
  REGION 1..9: note = Description of Artificial Sequence: Synthetic peptide
IIWFLLLSV

SEQ ID NO: 11311 - protein, 9 aa, synthetic construct
  REGION 1..9: note = Description of Artificial Sequence: Synthetic peptide
IKWPWYIWL

SEQ ID NO: 11312 - protein, 9 aa, synthetic construct
  REGION 1..9: note = Description of Artificial Sequence: Synthetic peptide
ISTKHFYWF

SEQ ID NO: 11313 - protein, 10 aa, synthetic construct
  REGION 1..10: note = Description of Artificial Sequence: Synthetic peptide
ITILDGISQY

SEQ ID NO: 11314 - protein, 9 aa, synthetic construct
  REGION 1..9: note = Description of Artificial Sequence: Synthetic peptide
IYNDKVAGF

SEQ ID NO: 11315 - protein, 9 aa, synthetic construct
  REGION 1..9: note = Description of Artificial Sequence: Synthetic peptide
KACPLIAAV

SEQ ID NO: 11316 - protein, 9 aa, synthetic construct
  REGION 1..9: note = Description of Artificial Sequence: Synthetic peptide
KENSYTTTI

SEQ ID NO: 11317 - protein, 9 aa, synthetic construct
  REGION 1..9: note = Description of Artificial Sequence: Synthetic peptide
KFTDGVCLF

SEQ ID NO: 11318 - protein, 9 aa, synthetic construct
  REGION 1..9: note = Description of Artificial Sequence: Synthetic peptide
KIEELFYSY

SEQ ID NO: 11319 - protein, 9 aa, synthetic construct
  REGION 1..9: note = Description of Artificial Sequence: Synthetic peptide
KLKPVLDWL

SEQ ID NO: 11320 - protein, 10 aa, synthetic construct
  REGION 1..10: note = Description of Artificial Sequence: Synthetic peptide
KMFDAYVNTF

SEQ ID NO: 11321 - protein, 8 aa, synthetic construct
  REGION 1..8: note = Description of Artificial Sequence: Synthetic peptide
LADKFPVL

SEQ ID NO: 11322 - protein, 9 aa, synthetic construct
  REGION 1..9: note = Description of Artificial Sequence: Synthetic peptide
LIISVTSNY

SEQ ID NO: 11323 - protein, 9 aa, synthetic construct
  REGION 1..9: note = Description of Artificial Sequence: Synthetic peptide
LLLDDFVEI

SEQ ID NO: 11324 - protein, 9 aa, synthetic construct
  REGION 1..9: note = Description of Artificial Sequence: Synthetic peptide
LPPAYTNSF

SEQ ID NO: 11325 - protein, 9 aa, synthetic construct
  REGION 1..9: note = Description of Artificial Sequence: Synthetic peptide
LQTPFEIKL

SEQ ID NO: 11326 - protein, 9 aa, synthetic construct
  REGION 1..9: note = Description of Artificial Sequence: Synthetic peptide
LRSDVLLPL

SEQ ID NO: 11327 - protein, 9 aa, synthetic construct
  REGION 1..9: note = Description of Artificial Sequence: Synthetic peptide
LTKHPNQEY

SEQ ID NO: 11328 - protein, 9 aa, synthetic construct
  REGION 1..9: note = Description of Artificial Sequence: Synthetic peptide
LVRDLPQGF

SEQ ID NO: 11329 - protein, 8 aa, synthetic construct
  REGION 1..8: note = Description of Artificial Sequence: Synthetic peptide
MSAPPAQY

SEQ ID NO: 11330 - protein, 9 aa, synthetic construct
  REGION 1..9: note = Description of Artificial Sequence: Synthetic peptide
NATNVVIKV

SEQ ID NO: 11331 - protein, 9 aa, synthetic construct
  REGION 1..9: note = Description of Artificial Sequence: Synthetic peptide
NSIAIPTNF

SEQ ID NO: 11332 - protein, 9 aa, synthetic construct
  REGION 1..9: note = Description of Artificial Sequence: Synthetic peptide
RAMPNMLRI

SEQ ID NO: 11333 - protein, 9 aa, synthetic construct
  REGION 1..9: note = Description of Artificial Sequence: Synthetic peptide
REHEHEIAW

SEQ ID NO: 11334 - protein, 10 aa, synthetic construct
  REGION 1..10: note = Description of Artificial Sequence: Synthetic peptide
REHEHEIAWY

SEQ ID NO: 11335 - protein, 9 aa, synthetic construct
  REGION 1..9: note = Description of Artificial Sequence: Synthetic peptide
REVLSDREL

SEQ ID NO: 11336 - protein, 9 aa, synthetic construct
  REGION 1..9: note = Description of Artificial Sequence: Synthetic peptide
RSFIEDLLF

SEQ ID NO: 11337 - protein, 9 aa, synthetic construct
  REGION 1..9: note = Description of Artificial Sequence: Synthetic peptide
RTNVYLAVF

SEQ ID NO: 11338 - protein, 10 aa, synthetic construct
  REGION 1..10: note = Description of Artificial Sequence: Synthetic peptide
RYFKYWDQTY

SEQ ID NO: 11339 - protein, 9 aa, synthetic construct
  REGION 1..9: note = Description of Artificial Sequence: Synthetic peptide
SALWEIQQV

SEQ ID NO: 11340 - protein, 9 aa, synthetic construct
  REGION 1..9: note = Description of Artificial Sequence: Synthetic peptide
SANNCTFEY

SEQ ID NO: 11341 - protein, 9 aa, synthetic construct
  REGION 1..9: note = Description of Artificial Sequence: Synthetic peptide
SEAVEAPLV

SEQ ID NO: 11342 - protein, 9 aa, synthetic construct
  REGION 1..9: note = Description of Artificial Sequence: Synthetic peptide
SEDNQTTTI

SEQ ID NO: 11343 - protein, 9 aa, synthetic construct
  REGION 1..9: note = Description of Artificial Sequence: Synthetic peptide
SEFDRDAAM

SEQ ID NO: 11344 - protein, 9 aa, synthetic construct
  REGION 1..9: note = Description of Artificial Sequence: Synthetic peptide
SEIIGYKAI

SEQ ID NO: 11345 - protein, 9 aa, synthetic construct
  REGION 1..9: note = Description of Artificial Sequence: Synthetic peptide
SFNPETNIL

SEQ ID NO: 11346 - protein, 8 aa, synthetic construct
  REGION 1..8: note = Description of Artificial Sequence: Synthetic peptide
SHKPPISF

SEQ ID NO: 11347 - protein, 8 aa, synthetic construct
  REGION 1..8: note = Description of Artificial Sequence: Synthetic peptide
SSSDNIAL

SEQ ID NO: 11348 - protein, 9 aa, synthetic construct
  REGION 1..9: note = Description of Artificial Sequence: Synthetic peptide
SVLNDILSR

SEQ ID NO: 11349 - protein, 9 aa, synthetic construct
  REGION 1..9: note = Description of Artificial Sequence: Synthetic peptide
SWNADLYKL

SEQ ID NO: 11350 - protein, 9 aa, synthetic construct
  REGION 1..9: note = Description of Artificial Sequence: Synthetic peptide
SYSGQSTQL

SEQ ID NO: 11351 - protein, 9 aa, synthetic construct
  REGION 1..9: note = Description of Artificial Sequence: Synthetic peptide
TELEPPCRF

SEQ ID NO: 11352 - protein, 9 aa, synthetic construct
  REGION 1..9: note = Description of Artificial Sequence: Synthetic peptide
TLIVNSVLL

SEQ ID NO: 11353 - protein, 9 aa, synthetic construct
  REGION 1..9: note = Description of Artificial Sequence: Synthetic peptide
TPFDVVRQC

SEQ ID NO: 11354 - protein, 9 aa, synthetic construct
  REGION 1..9: note = Description of Artificial Sequence: Synthetic peptide
TPSGTWLTY

SEQ ID NO: 11355 - protein, 8 aa, synthetic construct
  REGION 1..8: note = Description of Artificial Sequence: Synthetic peptide
VASKILGL

SEQ ID NO: 11356 - protein, 9 aa, synthetic construct
  REGION 1..9: note = Description of Artificial Sequence: Synthetic peptide
VDTDFVNEF

SEQ ID NO: 11357 - protein, 9 aa, synthetic construct
  REGION 1..9: note = Description of Artificial Sequence: Synthetic peptide
VIYLYLTFY

SEQ ID NO: 11358 - protein, 8 aa, synthetic construct
  REGION 1..8: note = Description of Artificial Sequence: Synthetic peptide
VLYENQKL

SEQ ID NO: 11359 - protein, 9 aa, synthetic construct
  REGION 1..9: note = Description of Artificial Sequence: Synthetic peptide
VMFTPLVPF

SEQ ID NO: 11360 - protein, 8 aa, synthetic construct
  REGION 1..8: note = Description of Artificial Sequence: Synthetic peptide
VSDIDITF

SEQ ID NO: 11361 - protein, 10 aa, synthetic construct
  REGION 1..10: note = Description of Artificial Sequence: Synthetic peptide
VTIDYTEISF

SEQ ID NO: 11362 - protein, 10 aa, synthetic construct
  REGION 1..10: note = Description of Artificial Sequence: Synthetic peptide
VVDDPCPIHF

SEQ ID NO: 11363 - protein, 9 aa, synthetic construct
  REGION 1..9: note = Description of Artificial Sequence: Synthetic peptide
VVDYGARFY

SEQ ID NO: 11364 - protein, 9 aa, synthetic construct
  REGION 1..9: note = Description of Artificial Sequence: Synthetic peptide
VVNQNAQAL

SEQ ID NO: 11365 - protein, 9 aa, synthetic construct
  REGION 1..9: note = Description of Artificial Sequence: Synthetic peptide
VVVNAANVY

SEQ ID NO: 11366 - protein, 9 aa, synthetic construct
  REGION 1..9: note = Description of Artificial Sequence: Synthetic peptide
YANSVFNIC

SEQ ID NO: 11367 - protein, 9 aa, synthetic construct
  REGION 1..9: note = Description of Artificial Sequence: Synthetic peptide
YFTEQPIDL

SEQ ID NO: 11368 - protein, 9 aa, synthetic construct
  REGION 1..9: note = Description of Artificial Sequence: Synthetic peptide
YFVVKRHTF

SEQ ID NO: 11369 - protein, 8 aa, synthetic construct
  REGION 1..8: note = Description of Artificial Sequence: Synthetic peptide
YIVDSVTV

SEQ ID NO: 11370 - protein, 9 aa, synthetic construct
  REGION 1..9: note = Description of Artificial Sequence: Synthetic peptide
YKKPASREL

SEQ ID NO: 11371 - protein, 8 aa, synthetic construct
  REGION 1..8: note = Description of Artificial Sequence: Synthetic peptide
YSFLPGVY

SEQ ID NO: 11372 - protein, 8 aa, synthetic construct
  REGION 1..8: note = Description of Artificial Sequence: Synthetic peptide
YSVIYLYL

SEQ ID NO: 11373 - protein, 9 aa, synthetic construct
  REGION 1..9: note = Description of Artificial Sequence: Synthetic peptide
YYTSNPTTF

SEQ ID NO: 11374 - protein, 9 aa, synthetic construct
  REGION 1..9: note = Description of Artificial Sequence: Synthetic peptide
AANFCALIL

SEQ ID NO: 11375 - protein, 9 aa, synthetic construct
  REGION 1..9: note = Description of Artificial Sequence: Synthetic peptide
ACFVLAAVY

SEQ ID NO: 11376 - protein, 8 aa, synthetic construct
  REGION 1..8: note = Description of Artificial Sequence: Synthetic peptide
AELEGIQY

SEQ ID NO: 11377 - protein, 9 aa, synthetic construct
  REGION 1..9: note = Description of Artificial Sequence: Synthetic peptide
ALCEKALKY

SEQ ID NO: 11378 - protein, 9 aa, synthetic construct
  REGION 1..9: note = Description of Artificial Sequence: Synthetic peptide
ALLTKSSEY

SEQ ID NO: 11379 - protein, 9 aa, synthetic construct
  REGION 1..9: note = Description of Artificial Sequence: Synthetic peptide
ALWEIQQVV

SEQ ID NO: 11380 - protein, 9 aa, synthetic construct
  REGION 1..9: note = Description of Artificial Sequence: Synthetic peptide
ATSRTLSYY

SEQ ID NO: 11381 - protein, 9 aa, synthetic construct
  REGION 1..9: note = Description of Artificial Sequence: Synthetic peptide
AVVCFNSTY

SEQ ID NO: 11382 - protein, 9 aa, synthetic construct
  REGION 1..9: note = Description of Artificial Sequence: Synthetic peptide
AYILFTRFF

SEQ ID NO: 11383 - protein, 9 aa, synthetic construct
  REGION 1..9: note = Description of Artificial Sequence: Synthetic peptide
DEDDSEPVL

SEQ ID NO: 11384 - protein, 9 aa, synthetic construct
  REGION 1..9: note = Description of Artificial Sequence: Synthetic peptide
EEHVQIHTI

SEQ ID NO: 11385 - protein, 9 aa, synthetic construct
  REGION 1..9: note = Description of Artificial Sequence: Synthetic peptide
EIKESVQTF

SEQ ID NO: 11386 - protein, 9 aa, synthetic construct
  REGION 1..9: note = Description of Artificial Sequence: Synthetic peptide
ELTPVVQTI

SEQ ID NO: 11387 - protein, 9 aa, synthetic construct
  REGION 1..9: note = Description of Artificial Sequence: Synthetic peptide
ELYSPIFLI

SEQ ID NO: 11388 - protein, 9 aa, synthetic construct
  REGION 1..9: note = Description of Artificial Sequence: Synthetic peptide
FAYANRNRF

SEQ ID NO: 11389 - protein, 9 aa, synthetic construct
  REGION 1..9: note = Description of Artificial Sequence: Synthetic peptide
FGDSVEEVL

SEQ ID NO: 11390 - protein, 10 aa, synthetic construct
  REGION 1..10: note = Description of Artificial Sequence: Synthetic peptide
FHLDGEVITF

SEQ ID NO: 11391 - protein, 8 aa, synthetic construct
  REGION 1..8: note = Description of Artificial Sequence: Synthetic peptide
FPFTIYSL

SEQ ID NO: 11392 - protein, 8 aa, synthetic construct
  REGION 1..8: note = Description of Artificial Sequence: Synthetic peptide
FSYFAVHF

SEQ ID NO: 11393 - protein, 9 aa, synthetic construct
  REGION 1..9: note = Description of Artificial Sequence: Synthetic peptide
FTEERLKLF

SEQ ID NO: 11394 - protein, 9 aa, synthetic construct
  REGION 1..9: note = Description of Artificial Sequence: Synthetic peptide
FTNVYADSF

SEQ ID NO: 11395 - protein, 8 aa, synthetic construct
  REGION 1..8: note = Description of Artificial Sequence: Synthetic peptide
FVFPLNSI

SEQ ID NO: 11396 - protein, 9 aa, synthetic construct
  REGION 1..9: note = Description of Artificial Sequence: Synthetic peptide
FVVSTGYHF

SEQ ID NO: 11397 - protein, 8 aa, synthetic construct
  REGION 1..8: note = Description of Artificial Sequence: Synthetic peptide
GAVDINKL

SEQ ID NO: 11398 - protein, 9 aa, synthetic construct
  REGION 1..9: note = Description of Artificial Sequence: Synthetic peptide
GSVRVVTTF

SEQ ID NO: 11399 - protein, 9 aa, synthetic construct
  REGION 1..9: note = Description of Artificial Sequence: Synthetic peptide
GVVDYGARF

SEQ ID NO: 11400 - protein, 8 aa, synthetic construct
  REGION 1..8: note = Description of Artificial Sequence: Synthetic peptide
HAFHTPAF

SEQ ID NO: 11401 - protein, 9 aa, synthetic construct
  REGION 1..9: note = Description of Artificial Sequence: Synthetic peptide
HVVAFNTLL

SEQ ID NO: 11402 - protein, 9 aa, synthetic construct
  REGION 1..9: note = Description of Artificial Sequence: Synthetic peptide
HWFVTQRNF

SEQ ID NO: 11403 - protein, 9 aa, synthetic construct
  REGION 1..9: note = Description of Artificial Sequence: Synthetic peptide
IAAVITREV

SEQ ID NO: 11404 - protein, 8 aa, synthetic construct
  REGION 1..8: note = Description of Artificial Sequence: Synthetic peptide
IAIILASF

SEQ ID NO: 11405 - protein, 9 aa, synthetic construct
  REGION 1..9: note = Description of Artificial Sequence: Synthetic peptide
IAMACLVGL

SEQ ID NO: 11406 - protein, 9 aa, synthetic construct
  REGION 1..9: note = Description of Artificial Sequence: Synthetic peptide
IFTIGTVTL

SEQ ID NO: 11407 - protein, 9 aa, synthetic construct
  REGION 1..9: note = Description of Artificial Sequence: Synthetic peptide
IFVDGVPFV

SEQ ID NO: 11408 - protein, 9 aa, synthetic construct
  REGION 1..9: note = Description of Artificial Sequence: Synthetic peptide
ILKPANNSL

SEQ ID NO: 11409 - protein, 8 aa, synthetic construct
  REGION 1..8: note = Description of Artificial Sequence: Synthetic peptide
IQFPNTYL

SEQ ID NO: 11410 - protein, 9 aa, synthetic construct
  REGION 1..9: note = Description of Artificial Sequence: Synthetic peptide
IRQEEVQEL

SEQ ID NO: 11411 - protein, 9 aa, synthetic construct
  REGION 1..9: note = Description of Artificial Sequence: Synthetic peptide
ITVNVLAWL

SEQ ID NO: 11412 - protein, 9 aa, synthetic construct
  REGION 1..9: note = Description of Artificial Sequence: Synthetic peptide
IVAIVVTCL

SEQ ID NO: 11413 - protein, 9 aa, synthetic construct
  REGION 1..9: note = Description of Artificial Sequence: Synthetic peptide
KTIGPDMFL

SEQ ID NO: 11414 - protein, 9 aa, synthetic construct
  REGION 1..9: note = Description of Artificial Sequence: Synthetic peptide
LAAIMQLFF

SEQ ID NO: 11415 - protein, 8 aa, synthetic construct
  REGION 1..8: note = Description of Artificial Sequence: Synthetic peptide
LAFVVFLL

SEQ ID NO: 11416 - protein, 9 aa, synthetic construct
  REGION 1..9: note = Description of Artificial Sequence: Synthetic peptide
LEYHDVRVV

SEQ ID NO: 11417 - protein, 9 aa, synthetic construct
  REGION 1..9: note = Description of Artificial Sequence: Synthetic peptide
LIVNSVLLF

SEQ ID NO: 11418 - protein, 9 aa, synthetic construct
  REGION 1..9: note = Description of Artificial Sequence: Synthetic peptide
LLDDFVEII

SEQ ID NO: 11419 - protein, 9 aa, synthetic construct
  REGION 1..9: note = Description of Artificial Sequence: Synthetic peptide
LLFLAFVVF

SEQ ID NO: 11420 - protein, 8 aa, synthetic construct
  REGION 1..8: note = Description of Artificial Sequence: Synthetic peptide
LTNDVSFL

SEQ ID NO: 11421 - protein, 10 aa, synthetic construct
  REGION 1..10: note = Description of Artificial Sequence: Synthetic peptide
LVAELEGIQY

SEQ ID NO: 11422 - protein, 9 aa, synthetic construct
  REGION 1..9: note = Description of Artificial Sequence: Synthetic peptide
LYIIKLIFL

SEQ ID NO: 11423 - protein, 9 aa, synthetic construct
  REGION 1..9: note = Description of Artificial Sequence: Synthetic peptide
MPYFFTLLL

SEQ ID NO: 11424 - protein, 9 aa, synthetic construct
  REGION 1..9: note = Description of Artificial Sequence: Synthetic peptide
NALDQAISM

SEQ ID NO: 11425 - protein, 9 aa, synthetic construct
  REGION 1..9: note = Description of Artificial Sequence: Synthetic peptide
NCYFPLQSY

SEQ ID NO: 11426 - protein, 10 aa, synthetic construct
  REGION 1..10: note = Description of Artificial Sequence: Synthetic peptide
NTNPIQLSSY

SEQ ID NO: 11427 - protein, 9 aa, synthetic construct
  REGION 1..9: note = Description of Artificial Sequence: Synthetic peptide
NVFAFPFTI

SEQ ID NO: 11428 - protein, 9 aa, synthetic construct
  REGION 1..9: note = Description of Artificial Sequence: Synthetic peptide
PANNAAIVL

SEQ ID NO: 11429 - protein, 9 aa, synthetic construct
  REGION 1..9: note = Description of Artificial Sequence: Synthetic peptide
PQIGVVREF

SEQ ID NO: 11430 - protein, 8 aa, synthetic construct
  REGION 1..8: note = Description of Artificial Sequence: Synthetic peptide
RANSAVKL

SEQ ID NO: 11431 - protein, 9 aa, synthetic construct
  REGION 1..9: note = Description of Artificial Sequence: Synthetic peptide
RARSVSPKL

SEQ ID NO: 11432 - protein, 9 aa, synthetic construct
  REGION 1..9: note = Description of Artificial Sequence: Synthetic peptide
RFKESPFEL

SEQ ID NO: 11433 - protein, 9 aa, synthetic construct
  REGION 1..9: note = Description of Artificial Sequence: Synthetic peptide
RGWIFGTTL

SEQ ID NO: 11434 - protein, 9 aa, synthetic construct
  REGION 1..9: note = Description of Artificial Sequence: Synthetic peptide
RITGLYPTL

SEQ ID NO: 11435 - protein, 9 aa, synthetic construct
  REGION 1..9: note = Description of Artificial Sequence: Synthetic peptide
RLYYDSMSY

SEQ ID NO: 11436 - protein, 8 aa, synthetic construct
  REGION 1..8: note = Description of Artificial Sequence: Synthetic peptide
RQEEVQEL

SEQ ID NO: 11437 - protein, 9 aa, synthetic construct
  REGION 1..9: note = Description of Artificial Sequence: Synthetic peptide
SAKSASVYY

SEQ ID NO: 11438 - protein, 9 aa, synthetic construct
  REGION 1..9: note = Description of Artificial Sequence: Synthetic peptide
SAVVLLILM

SEQ ID NO: 11439 - protein, 9 aa, synthetic construct
  REGION 1..9: note = Description of Artificial Sequence: Synthetic peptide
SLIYSTAAL

SEQ ID NO: 11440 - protein, 9 aa, synthetic construct
  REGION 1..9: note = Description of Artificial Sequence: Synthetic peptide
SLLSVLLSM

SEQ ID NO: 11441 - protein, 9 aa, synthetic construct
  REGION 1..9: note = Description of Artificial Sequence: Synthetic peptide
SMWALIISV

SEQ ID NO: 11442 - protein, 10 aa, synthetic construct
  REGION 1..10: note = Description of Artificial Sequence: Synthetic peptide
SQMEIDFLEL

SEQ ID NO: 11443 - protein, 9 aa, synthetic construct
  REGION 1..9: note = Description of Artificial Sequence: Synthetic peptide
STDVVYRAF

SEQ ID NO: 11444 - protein, 10 aa, synthetic construct
  REGION 1..10: note = Description of Artificial Sequence: Synthetic peptide
SVASQSIIAY

SEQ ID NO: 11445 - protein, 9 aa, synthetic construct
  REGION 1..9: note = Description of Artificial Sequence: Synthetic peptide
TEETFKLSY

SEQ ID NO: 11446 - protein, 9 aa, synthetic construct
  REGION 1..9: note = Description of Artificial Sequence: Synthetic peptide
TSNPTTFHL

SEQ ID NO: 11447 - protein, 9 aa, synthetic construct
  REGION 1..9: note = Description of Artificial Sequence: Synthetic peptide
TTFTYASAL

SEQ ID NO: 11448 - protein, 9 aa, synthetic construct
  REGION 1..9: note = Description of Artificial Sequence: Synthetic peptide
TVAYFNMVY

SEQ ID NO: 11449 - protein, 9 aa, synthetic construct
  REGION 1..9: note = Description of Artificial Sequence: Synthetic peptide
VAKHDFFKF

SEQ ID NO: 11450 - protein, 10 aa, synthetic construct
  REGION 1..10: note = Description of Artificial Sequence: Synthetic peptide
VANGDSEVVL

SEQ ID NO: 11451 - protein, 9 aa, synthetic construct
  REGION 1..9: note = Description of Artificial Sequence: Synthetic peptide
VAYFNMVYM

SEQ ID NO: 11452 - protein, 9 aa, synthetic construct
  REGION 1..9: note = Description of Artificial Sequence: Synthetic peptide
VFLGIITTV

SEQ ID NO: 11453 - protein, 9 aa, synthetic construct
  REGION 1..9: note = Description of Artificial Sequence: Synthetic peptide
VLNEKCSAY

SEQ ID NO: 11454 - protein, 9 aa, synthetic construct
  REGION 1..9: note = Description of Artificial Sequence: Synthetic peptide
VLWAHGFEL

SEQ ID NO: 11455 - protein, 9 aa, synthetic construct
  REGION 1..9: note = Description of Artificial Sequence: Synthetic peptide
VRDPQTLEI

SEQ ID NO: 11456 - protein, 9 aa, synthetic construct
  REGION 1..9: note = Description of Artificial Sequence: Synthetic peptide
VTLAILTAL

SEQ ID NO: 11457 - protein, 9 aa, synthetic construct
  REGION 1..9: note = Description of Artificial Sequence: Synthetic peptide
VVNAANVYL

SEQ ID NO: 11458 - protein, 9 aa, synthetic construct
  REGION 1..9: note = Description of Artificial Sequence: Synthetic peptide
WVYKQFDTY

SEQ ID NO: 11459 - protein, 9 aa, synthetic construct
  REGION 1..9: note = Description of Artificial Sequence: Synthetic peptide
YFIASFRLF

SEQ ID NO: 11460 - protein, 9 aa, synthetic construct
  REGION 1..9: note = Description of Artificial Sequence: Synthetic peptide
YFIKGLNNL

SEQ ID NO: 11461 - protein, 9 aa, synthetic construct
  REGION 1..9: note = Description of Artificial Sequence: Synthetic peptide
YIDIGNYTV

SEQ ID NO: 11462 - protein, 10 aa, synthetic construct
  REGION 1..10: note = Description of Artificial Sequence: Synthetic peptide
YTTTIKPVTY

SEQ ID NO: 11463 - protein, 9 aa, synthetic construct
  REGION 1..9: note = Description of Artificial Sequence: Synthetic peptide
AEILLIIMR

SEQ ID NO: 11464 - protein, 9 aa, synthetic construct
  REGION 1..9: note = Description of Artificial Sequence: Synthetic peptide
APFLYLYAL

SEQ ID NO: 11465 - protein, 8 aa, synthetic construct
  REGION 1..8: note = Description of Artificial Sequence: Synthetic peptide
ASLNGVTL

SEQ ID NO: 11466 - protein, 10 aa, synthetic construct
  REGION 1..10: note = Description of Artificial Sequence: Synthetic peptide
AYITGGVVQL

SEQ ID NO: 11467 - protein, 9 aa, synthetic construct
  REGION 1..9: note = Description of Artificial Sequence: Synthetic peptide
CVEEVTTTL

SEQ ID NO: 11468 - protein, 9 aa, synthetic construct
  REGION 1..9: note = Description of Artificial Sequence: Synthetic peptide
DTYNLWNTF

SEQ ID NO: 11469 - protein, 9 aa, synthetic construct
  REGION 1..9: note = Description of Artificial Sequence: Synthetic peptide
DVFHLYLQY

SEQ ID NO: 11470 - protein, 9 aa, synthetic construct
  REGION 1..9: note = Description of Artificial Sequence: Synthetic peptide
FAPSASAFF

SEQ ID NO: 11471 - protein, 9 aa, synthetic construct
  REGION 1..9: note = Description of Artificial Sequence: Synthetic peptide
FIAGLIAIV

SEQ ID NO: 11472 - protein, 9 aa, synthetic construct
  REGION 1..9: note = Description of Artificial Sequence: Synthetic peptide
FKEGSSVEL

SEQ ID NO: 11473 - protein, 9 aa, synthetic construct
  REGION 1..9: note = Description of Artificial Sequence: Synthetic peptide
FLFLTWICL

SEQ ID NO: 11474 - protein, 9 aa, synthetic construct
  REGION 1..9: note = Description of Artificial Sequence: Synthetic peptide
FLIVAAIVF

SEQ ID NO: 11475 - protein, 9 aa, synthetic construct
  REGION 1..9: note = Description of Artificial Sequence: Synthetic peptide
FTDGVCLFW

SEQ ID NO: 11476 - protein, 8 aa, synthetic construct
  REGION 1..8: note = Description of Artificial Sequence: Synthetic peptide
HANEYRLY

SEQ ID NO: 11477 - protein, 9 aa, synthetic construct
  REGION 1..9: note = Description of Artificial Sequence: Synthetic peptide
HEGKTFYVL

SEQ ID NO: 11478 - protein, 9 aa, synthetic construct
  REGION 1..9: note = Description of Artificial Sequence: Synthetic peptide
IATNGPLKV

SEQ ID NO: 11479 - protein, 9 aa, synthetic construct
  REGION 1..9: note = Description of Artificial Sequence: Synthetic peptide
IIFLEGETL

SEQ ID NO: 11480 - protein, 9 aa, synthetic construct
  REGION 1..9: note = Description of Artificial Sequence: Synthetic peptide
ISNSWLMWL

SEQ ID NO: 11481 - protein, 9 aa, synthetic construct
  REGION 1..9: note = Description of Artificial Sequence: Synthetic peptide
KENDSKEGF

SEQ ID NO: 11482 - protein, 9 aa, synthetic construct
  REGION 1..9: note = Description of Artificial Sequence: Synthetic peptide
KIQEGVVDY

SEQ ID NO: 11483 - protein, 9 aa, synthetic construct
  REGION 1..9: note = Description of Artificial Sequence: Synthetic peptide
KMVSLLSVL

SEQ ID NO: 11484 - protein, 9 aa, synthetic construct
  REGION 1..9: note = Description of Artificial Sequence: Synthetic peptide
KPVPEVKIL

SEQ ID NO: 11485 - protein, 9 aa, synthetic construct
  REGION 1..9: note = Description of Artificial Sequence: Synthetic peptide
KRVDWTIEY

SEQ ID NO: 11486 - protein, 10 aa, synthetic construct
  REGION 1..10: note = Description of Artificial Sequence: Synthetic peptide
KVDGVDVELF

SEQ ID NO: 11487 - protein, 9 aa, synthetic construct
  REGION 1..9: note = Description of Artificial Sequence: Synthetic peptide
KVVKVTIDY

SEQ ID NO: 11488 - protein, 9 aa, synthetic construct
  REGION 1..9: note = Description of Artificial Sequence: Synthetic peptide
LAWPLIVTA

SEQ ID NO: 11489 - protein, 10 aa, synthetic construct
  REGION 1..10: note = Description of Artificial Sequence: Synthetic peptide
LAWPLIVTAL

SEQ ID NO: 11490 - protein, 9 aa, synthetic construct
  REGION 1..9: note = Description of Artificial Sequence: Synthetic peptide
LEAPFLYLY

SEQ ID NO: 11491 - protein, 9 aa, synthetic construct
  REGION 1..9: note = Description of Artificial Sequence: Synthetic peptide
LLLTILTSL

SEQ ID NO: 11492 - protein, 9 aa, synthetic construct
  REGION 1..9: note = Description of Artificial Sequence: Synthetic peptide
LQAENVTGL

SEQ ID NO: 11493 - protein, 8 aa, synthetic construct
  REGION 1..8: note = Description of Artificial Sequence: Synthetic peptide
MADLVYAL

SEQ ID NO: 11494 - protein, 8 aa, synthetic construct
  REGION 1..8: note = Description of Artificial Sequence: Synthetic peptide
NAAIVLQL

SEQ ID NO: 11495 - protein, 9 aa, synthetic construct
  REGION 1..9: note = Description of Artificial Sequence: Synthetic peptide
NLHPDSATL

SEQ ID NO: 11496 - protein, 9 aa, synthetic construct
  REGION 1..9: note = Description of Artificial Sequence: Synthetic peptide
NTASWFTAL

SEQ ID NO: 11497 - protein, 9 aa, synthetic construct
  REGION 1..9: note = Description of Artificial Sequence: Synthetic peptide
NYSGVVTTV

SEQ ID NO: 11498 - protein, 9 aa, synthetic construct
  REGION 1..9: note = Description of Artificial Sequence: Synthetic peptide
QTFSVLACY

SEQ ID NO: 11499 - protein, 9 aa, synthetic construct
  REGION 1..9: note = Description of Artificial Sequence: Synthetic peptide
QWLPTGTLL

SEQ ID NO: 11500 - protein, 8 aa, synthetic construct
  REGION 1..8: note = Description of Artificial Sequence: Synthetic peptide
RIQPGQTF

SEQ ID NO: 11501 - protein, 10 aa, synthetic construct
  REGION 1..10: note = Description of Artificial Sequence: Synthetic peptide
RTFKVSIWNL

SEQ ID NO: 11502 - protein, 9 aa, synthetic construct
  REGION 1..9: note = Description of Artificial Sequence: Synthetic peptide
RTIKGTHHW

SEQ ID NO: 11503 - protein, 9 aa, synthetic construct
  REGION 1..9: note = Description of Artificial Sequence: Synthetic peptide
RTILGSALL

SEQ ID NO: 11504 - protein, 8 aa, synthetic construct
  REGION 1..8: note = Description of Artificial Sequence: Synthetic peptide
SAPHGVVF

SEQ ID NO: 11505 - protein, 8 aa, synthetic construct
  REGION 1..8: note = Description of Artificial Sequence: Synthetic peptide
SAVVLLIL

SEQ ID NO: 11506 - protein, 8 aa, synthetic construct
  REGION 1..8: note = Description of Artificial Sequence: Synthetic peptide
SEYDYVIF

SEQ ID NO: 11507 - protein, 9 aa, synthetic construct
  REGION 1..9: note = Description of Artificial Sequence: Synthetic peptide
SSDNIALLV

SEQ ID NO: 11508 - protein, 9 aa, synthetic construct
  REGION 1..9: note = Description of Artificial Sequence: Synthetic peptide
TIVEVQPQL

SEQ ID NO: 11509 - protein, 9 aa, synthetic construct
  REGION 1..9: note = Description of Artificial Sequence: Synthetic peptide
TQAPTHLSV

SEQ ID NO: 11510 - protein, 8 aa, synthetic construct
  REGION 1..8: note = Description of Artificial Sequence: Synthetic peptide
VAIVVTCL

SEQ ID NO: 11511 - protein, 9 aa, synthetic construct
  REGION 1..9: note = Description of Artificial Sequence: Synthetic peptide
VASQSIIAY

SEQ ID NO: 11512 - protein, 10 aa, synthetic construct
  REGION 1..10: note = Description of Artificial Sequence: Synthetic peptide
VLMDGSIIQF

SEQ ID NO: 11513 - protein, 9 aa, synthetic construct
  REGION 1..9: note = Description of Artificial Sequence: Synthetic peptide
VPMEKLKTL

SEQ ID NO: 11514 - protein, 9 aa, synthetic construct
  REGION 1..9: note = Description of Artificial Sequence: Synthetic peptide
VSTSGRWVL

SEQ ID NO: 11515 - protein, 9 aa, synthetic construct
  REGION 1..9: note = Description of Artificial Sequence: Synthetic peptide
WTFGAGAAL

SEQ ID NO: 11516 - protein, 10 aa, synthetic construct
  REGION 1..10: note = Description of Artificial Sequence: Synthetic peptide
YASAVVLLIL

SEQ ID NO: 11517 - protein, 8 aa, synthetic construct
  REGION 1..8: note = Description of Artificial Sequence: Synthetic peptide
YIGDPAQL

SEQ ID NO: 11518 - protein, 9 aa, synthetic construct
  REGION 1..9: note = Description of Artificial Sequence: Synthetic peptide
YVDNSSLTI

SEQ ID NO: 11519 - protein, 9 aa, synthetic construct
  REGION 1..9: note = Description of Artificial Sequence: Synthetic peptide
YVLPNDDTL

SEQ ID NO: 11520 - protein, 8 aa, synthetic construct
  REGION 1..8: note = Description of Artificial Sequence: Synthetic peptide
AAIVFITL

SEQ ID NO: 11521 - protein, 9 aa, synthetic construct
  REGION 1..9: note = Description of Artificial Sequence: Synthetic peptide
AELAKNVSL

SEQ ID NO: 11522 - protein, 9 aa, synthetic construct
  REGION 1..9: note = Description of Artificial Sequence: Synthetic peptide
AHAEETRKL

SEQ ID NO: 11523 - protein, 9 aa, synthetic construct
  REGION 1..9: note = Description of Artificial Sequence: Synthetic peptide
ALNTLVKQL

SEQ ID NO: 11524 - protein, 9 aa, synthetic construct
  REGION 1..9: note = Description of Artificial Sequence: Synthetic peptide
ANKDGIIWV

SEQ ID NO: 11525 - protein, 9 aa, synthetic construct
  REGION 1..9: note = Description of Artificial Sequence: Synthetic peptide
ASAVVLLIL

SEQ ID NO: 11526 - protein, 9 aa, synthetic construct
  REGION 1..9: note = Description of Artificial Sequence: Synthetic peptide
ASFSTFKCY

SEQ ID NO: 11527 - protein, 9 aa, synthetic construct
  REGION 1..9: note = Description of Artificial Sequence: Synthetic peptide
EEFEPSTQY

SEQ ID NO: 11528 - protein, 9 aa, synthetic construct
  REGION 1..9: note = Description of Artificial Sequence: Synthetic peptide
FAFPFTIYS

SEQ ID NO: 11529 - protein, 9 aa, synthetic construct
  REGION 1..9: note = Description of Artificial Sequence: Synthetic peptide
FAMQMAYRF

SEQ ID NO: 11530 - protein, 9 aa, synthetic construct
  REGION 1..9: note = Description of Artificial Sequence: Synthetic peptide
FLFVAAIFY

SEQ ID NO: 11531 - protein, 9 aa, synthetic construct
  REGION 1..9: note = Description of Artificial Sequence: Synthetic peptide
FPFTIYSLL

SEQ ID NO: 11532 - protein, 9 aa, synthetic construct
  REGION 1..9: note = Description of Artificial Sequence: Synthetic peptide
FSNSGSDVL

SEQ ID NO: 11533 - protein, 9 aa, synthetic construct
  REGION 1..9: note = Description of Artificial Sequence: Synthetic peptide
HFYWFFSNY

SEQ ID NO: 11534 - protein, 9 aa, synthetic construct
  REGION 1..9: note = Description of Artificial Sequence: Synthetic peptide
HSLSHFVNL

SEQ ID NO: 11535 - protein, 8 aa, synthetic construct
  REGION 1..8: note = Description of Artificial Sequence: Synthetic peptide
IASEFSSL

SEQ ID NO: 11536 - protein, 9 aa, synthetic construct
  REGION 1..9: note = Description of Artificial Sequence: Synthetic peptide
ISTSHKLVL

SEQ ID NO: 11537 - protein, 9 aa, synthetic construct
  REGION 1..9: note = Description of Artificial Sequence: Synthetic peptide
IVNNWLKQL

SEQ ID NO: 11538 - protein, 9 aa, synthetic construct
  REGION 1..9: note = Description of Artificial Sequence: Synthetic peptide
IVSTIQRKY

SEQ ID NO: 11539 - protein, 8 aa, synthetic construct
  REGION 1..8: note = Description of Artificial Sequence: Synthetic peptide
KFKEGVEF

SEQ ID NO: 11540 - protein, 9 aa, synthetic construct
  REGION 1..9: note = Description of Artificial Sequence: Synthetic peptide
KIADYNYKL

SEQ ID NO: 11541 - protein, 9 aa, synthetic construct
  REGION 1..9: note = Description of Artificial Sequence: Synthetic peptide
KNFKSVLYY

SEQ ID NO: 11542 - protein, 9 aa, synthetic construct
  REGION 1..9: note = Description of Artificial Sequence: Synthetic peptide
KPNELSRVL

SEQ ID NO: 11543 - protein, 9 aa, synthetic construct
  REGION 1..9: note = Description of Artificial Sequence: Synthetic peptide
KQFDTYNLW

SEQ ID NO: 11544 - protein, 9 aa, synthetic construct
  REGION 1..9: note = Description of Artificial Sequence: Synthetic peptide
KSDGTGTIY

SEQ ID NO: 11545 - protein, 9 aa, synthetic construct
  REGION 1..9: note = Description of Artificial Sequence: Synthetic peptide
KVAGFAKFL

SEQ ID NO: 11546 - protein, 9 aa, synthetic construct
  REGION 1..9: note = Description of Artificial Sequence: Synthetic peptide
LQLPQGTTL

SEQ ID NO: 11547 - protein, 9 aa, synthetic construct
  REGION 1..9: note = Description of Artificial Sequence: Synthetic peptide
LTNIFGTVY

SEQ ID NO: 11548 - protein, 9 aa, synthetic construct
  REGION 1..9: note = Description of Artificial Sequence: Synthetic peptide
NSFTRGVYY

SEQ ID NO: 11549 - protein, 9 aa, synthetic construct
  REGION 1..9: note = Description of Artificial Sequence: Synthetic peptide
PANSTVLSF

SEQ ID NO: 11550 - protein, 9 aa, synthetic construct
  REGION 1..9: note = Description of Artificial Sequence: Synthetic peptide
RQLLFVVEV

SEQ ID NO: 11551 - protein, 8 aa, synthetic construct
  REGION 1..8: note = Description of Artificial Sequence: Synthetic peptide
RSKNPLLY

SEQ ID NO: 11552 - protein, 9 aa, synthetic construct
  REGION 1..9: note = Description of Artificial Sequence: Synthetic peptide
SAYENFNQH

SEQ ID NO: 11553 - protein, 9 aa, synthetic construct
  REGION 1..9: note = Description of Artificial Sequence: Synthetic peptide
SCNNYMLTY

SEQ ID NO: 11554 - protein, 9 aa, synthetic construct
  REGION 1..9: note = Description of Artificial Sequence: Synthetic peptide
SGVPVVDSY

SEQ ID NO: 11555 - protein, 9 aa, synthetic construct
  REGION 1..9: note = Description of Artificial Sequence: Synthetic peptide
SSAKSASVY

SEQ ID NO: 11556 - protein, 9 aa, synthetic construct
  REGION 1..9: note = Description of Artificial Sequence: Synthetic peptide
SSLPSYAAF

SEQ ID NO: 11557 - protein, 9 aa, synthetic construct
  REGION 1..9: note = Description of Artificial Sequence: Synthetic peptide
SSVELKHFF

SEQ ID NO: 11558 - protein, 9 aa, synthetic construct
  REGION 1..9: note = Description of Artificial Sequence: Synthetic peptide
TANPKTPKY

SEQ ID NO: 11559 - protein, 9 aa, synthetic construct
  REGION 1..9: note = Description of Artificial Sequence: Synthetic peptide
TIKPVTYKL

SEQ ID NO: 11560 - protein, 9 aa, synthetic construct
  REGION 1..9: note = Description of Artificial Sequence: Synthetic peptide
TILTSLLVL

SEQ ID NO: 11561 - protein, 8 aa, synthetic construct
  REGION 1..8: note = Description of Artificial Sequence: Synthetic peptide
TLQPVSEL

SEQ ID NO: 11562 - protein, 9 aa, synthetic construct
  REGION 1..9: note = Description of Artificial Sequence: Synthetic peptide
TVYEKLKPV

SEQ ID NO: 11563 - protein, 9 aa, synthetic construct
  REGION 1..9: note = Description of Artificial Sequence: Synthetic peptide
VAMPNLYKM

SEQ ID NO: 11564 - protein, 8 aa, synthetic construct
  REGION 1..8: note = Description of Artificial Sequence: Synthetic peptide
VAPGTAVL

SEQ ID NO: 11565 - protein, 8 aa, synthetic construct
  REGION 1..8: note = Description of Artificial Sequence: Synthetic peptide
VAYRKVLL

SEQ ID NO: 11566 - protein, 9 aa, synthetic construct
  REGION 1..9: note = Description of Artificial Sequence: Synthetic peptide
VLSDRELHL

SEQ ID NO: 11567 - protein, 9 aa, synthetic construct
  REGION 1..9: note = Description of Artificial Sequence: Synthetic peptide
VMYMGTLSY

SEQ ID NO: 11568 - protein, 9 aa, synthetic construct
  REGION 1..9: note = Description of Artificial Sequence: Synthetic peptide
VSDIDITFL

SEQ ID NO: 11569 - protein, 9 aa, synthetic construct
  REGION 1..9: note = Description of Artificial Sequence: Synthetic peptide
VSIINNTVY

SEQ ID NO: 11570 - protein, 9 aa, synthetic construct
  REGION 1..9: note = Description of Artificial Sequence: Synthetic peptide
VTDVTQLYL

SEQ ID NO: 11571 - protein, 9 aa, synthetic construct
  REGION 1..9: note = Description of Artificial Sequence: Synthetic peptide
VVFLHVTYV

SEQ ID NO: 11572 - protein, 9 aa, synthetic construct
  REGION 1..9: note = Description of Artificial Sequence: Synthetic peptide
VYIGDPAQL

SEQ ID NO: 11573 - protein, 8 aa, synthetic construct
  REGION 1..8: note = Description of Artificial Sequence: Synthetic peptide
YADVFHLY

SEQ ID NO: 11574 - protein, 9 aa, synthetic construct
  REGION 1..9: note = Description of Artificial Sequence: Synthetic peptide
YIKWDLLKY

SEQ ID NO: 11575 - protein, 8 aa, synthetic construct
  REGION 1..8: note = Description of Artificial Sequence: Synthetic peptide
YPIIGDEL

SEQ ID NO: 11576 - protein, 9 aa, synthetic construct
  REGION 1..9: note = Description of Artificial Sequence: Synthetic peptide
AAISDYDYY

SEQ ID NO: 11577 - protein, 9 aa, synthetic construct
  REGION 1..9: note = Description of Artificial Sequence: Synthetic peptide
ADAGFIKQY

SEQ ID NO: 11578 - protein, 9 aa, synthetic construct
  REGION 1..9: note = Description of Artificial Sequence: Synthetic peptide
ASRELKVTF

SEQ ID NO: 11579 - protein, 9 aa, synthetic construct
  REGION 1..9: note = Description of Artificial Sequence: Synthetic peptide
CQYLNTLTL

SEQ ID NO: 11580 - protein, 9 aa, synthetic construct
  REGION 1..9: note = Description of Artificial Sequence: Synthetic peptide
DAALALLLL

SEQ ID NO: 11581 - protein, 9 aa, synthetic construct
  REGION 1..9: note = Description of Artificial Sequence: Synthetic peptide
DAVRDPQTL

SEQ ID NO: 11582 - protein, 9 aa, synthetic construct
  REGION 1..9: note = Description of Artificial Sequence: Synthetic peptide
DVTDVTQLY

SEQ ID NO: 11583 - protein, 8 aa, synthetic construct
  REGION 1..8: note = Description of Artificial Sequence: Synthetic peptide
FAPSASAF

SEQ ID NO: 11584 - protein, 9 aa, synthetic construct
  REGION 1..9: note = Description of Artificial Sequence: Synthetic peptide
FVDGVPFVV

SEQ ID NO: 11585 - protein, 9 aa, synthetic construct
  REGION 1..9: note = Description of Artificial Sequence: Synthetic peptide
FVSNGTHWF

SEQ ID NO: 11586 - protein, 9 aa, synthetic construct
  REGION 1..9: note = Description of Artificial Sequence: Synthetic peptide
GTFTCASEY

SEQ ID NO: 11587 - protein, 9 aa, synthetic construct
  REGION 1..9: note = Description of Artificial Sequence: Synthetic peptide
GTITSGWTF

SEQ ID NO: 11588 - protein, 8 aa, synthetic construct
  REGION 1..8: note = Description of Artificial Sequence: Synthetic peptide
HAASGNLL

SEQ ID NO: 11589 - protein, 9 aa, synthetic construct
  REGION 1..9: note = Description of Artificial Sequence: Synthetic peptide
HCANFNVLF

SEQ ID NO: 11590 - protein, 10 aa, synthetic construct
  REGION 1..10: note = Description of Artificial Sequence: Synthetic peptide
IAFGGCVFSY

SEQ ID NO: 11591 - protein, 9 aa, synthetic construct
  REGION 1..9: note = Description of Artificial Sequence: Synthetic peptide
IAIPTNFTI

SEQ ID NO: 11592 - protein, 8 aa, synthetic construct
  REGION 1..8: note = Description of Artificial Sequence: Synthetic peptide
KADETQAL

SEQ ID NO: 11593 - protein, 9 aa, synthetic construct
  REGION 1..9: note = Description of Artificial Sequence: Synthetic peptide
KALNLGETF

SEQ ID NO: 11594 - protein, 9 aa, synthetic construct
  REGION 1..9: note = Description of Artificial Sequence: Synthetic peptide
KAPKEIIFL

SEQ ID NO: 11595 - protein, 9 aa, synthetic construct
  REGION 1..9: note = Description of Artificial Sequence: Synthetic peptide
KHWPQIAQF

SEQ ID NO: 11596 - protein, 9 aa, synthetic construct
  REGION 1..9: note = Description of Artificial Sequence: Synthetic peptide
KPVETSNSF

SEQ ID NO: 11597 - protein, 9 aa, synthetic construct
  REGION 1..9: note = Description of Artificial Sequence: Synthetic peptide
KSHKPPISF

SEQ ID NO: 11598 - protein, 9 aa, synthetic construct
  REGION 1..9: note = Description of Artificial Sequence: Synthetic peptide
KVNSTLEQY

SEQ ID NO: 11599 - protein, 8 aa, synthetic construct
  REGION 1..8: note = Description of Artificial Sequence: Synthetic peptide
LATALLTL

SEQ ID NO: 11600 - protein, 9 aa, synthetic construct
  REGION 1..9: note = Description of Artificial Sequence: Synthetic peptide
LLFLVLIML

SEQ ID NO: 11601 - protein, 9 aa, synthetic construct
  REGION 1..9: note = Description of Artificial Sequence: Synthetic peptide
LTDEMIAQY

SEQ ID NO: 11602 - protein, 9 aa, synthetic construct
  REGION 1..9: note = Description of Artificial Sequence: Synthetic peptide
LTNDNTSRY

SEQ ID NO: 11603 - protein, 9 aa, synthetic construct
  REGION 1..9: note = Description of Artificial Sequence: Synthetic peptide
NYMPYFFTL

SEQ ID NO: 11604 - protein, 9 aa, synthetic construct
  REGION 1..9: note = Description of Artificial Sequence: Synthetic peptide
RTIKVFTTV

SEQ ID NO: 11605 - protein, 9 aa, synthetic construct
  REGION 1..9: note = Description of Artificial Sequence: Synthetic peptide
SIIQFPNTY

SEQ ID NO: 11606 - protein, 9 aa, synthetic construct
  REGION 1..9: note = Description of Artificial Sequence: Synthetic peptide
SILSPLYAF

SEQ ID NO: 11607 - protein, 9 aa, synthetic construct
  REGION 1..9: note = Description of Artificial Sequence: Synthetic peptide
STGYHFREL

SEQ ID NO: 11608 - protein, 9 aa, synthetic construct
  REGION 1..9: note = Description of Artificial Sequence: Synthetic peptide
STQDLFLPF

SEQ ID NO: 11609 - protein, 9 aa, synthetic construct
  REGION 1..9: note = Description of Artificial Sequence: Synthetic peptide
TIAEILLII

SEQ ID NO: 11610 - protein, 9 aa, synthetic construct
  REGION 1..9: note = Description of Artificial Sequence: Synthetic peptide
TSNQVAVLY

SEQ ID NO: 11611 - protein, 9 aa, synthetic construct
  REGION 1..9: note = Description of Artificial Sequence: Synthetic peptide
TTTIKPVTY

SEQ ID NO: 11612 - protein, 8 aa, synthetic construct
  REGION 1..8: note = Description of Artificial Sequence: Synthetic peptide
VAFNTLLF

SEQ ID NO: 11613 - protein, 8 aa, synthetic construct
  REGION 1..8: note = Description of Artificial Sequence: Synthetic peptide
VASLINTL

SEQ ID NO: 11614 - protein, 9 aa, synthetic construct
  REGION 1..9: note = Description of Artificial Sequence: Synthetic peptide
VTIAEILLI

SEQ ID NO: 11615 - protein, 9 aa, synthetic construct
  REGION 1..9: note = Description of Artificial Sequence: Synthetic peptide
VTRELMREL

SEQ ID NO: 11616 - protein, 9 aa, synthetic construct
  REGION 1..9: note = Description of Artificial Sequence: Synthetic peptide
YIIKLIFLW

SEQ ID NO: 11617 - protein, 9 aa, synthetic construct
  REGION 1..9: note = Description of Artificial Sequence: Synthetic peptide
YLYALVYFL

SEQ ID NO: 11618 - protein, 8 aa, synthetic construct
  REGION 1..8: note = Description of Artificial Sequence: Synthetic peptide
YPDPSRIL

SEQ ID NO: 11619 - protein, 9 aa, synthetic construct
  REGION 1..9: note = Description of Artificial Sequence: Synthetic peptide
AALTNNVAF

SEQ ID NO: 11620 - protein, 9 aa, synthetic construct
  REGION 1..9: note = Description of Artificial Sequence: Synthetic peptide
AANTVIWDY

SEQ ID NO: 11621 - protein, 8 aa, synthetic construct
  REGION 1..8: note = Description of Artificial Sequence: Synthetic peptide
AVRDPQTL

SEQ ID NO: 11622 - protein, 9 aa, synthetic construct
  REGION 1..9: note = Description of Artificial Sequence: Synthetic peptide
FLAFVVFLL

SEQ ID NO: 11623 - protein, 9 aa, synthetic construct
  REGION 1..9: note = Description of Artificial Sequence: Synthetic peptide
FLNRFTTTL

SEQ ID NO: 11624 - protein, 9 aa, synthetic construct
  REGION 1..9: note = Description of Artificial Sequence: Synthetic peptide
FLYLYALVY

SEQ ID NO: 11625 - protein, 9 aa, synthetic construct
  REGION 1..9: note = Description of Artificial Sequence: Synthetic peptide
FTISVTTEI

SEQ ID NO: 11626 - protein, 9 aa, synthetic construct
  REGION 1..9: note = Description of Artificial Sequence: Synthetic peptide
GEYSHVVAF

SEQ ID NO: 11627 - protein, 8 aa, synthetic construct
  REGION 1..8: note = Description of Artificial Sequence: Synthetic peptide
HFIETISL

SEQ ID NO: 11628 - protein, 9 aa, synthetic construct
  REGION 1..9: note = Description of Artificial Sequence: Synthetic peptide
IADKYVRNL

SEQ ID NO: 11629 - protein, 9 aa, synthetic construct
  REGION 1..9: note = Description of Artificial Sequence: Synthetic peptide
IAQVDVVNF

SEQ ID NO: 11630 - protein, 9 aa, synthetic construct
  REGION 1..9: note = Description of Artificial Sequence: Synthetic peptide
ITVEELKKL

SEQ ID NO: 11631 - protein, 9 aa, synthetic construct
  REGION 1..9: note = Description of Artificial Sequence: Synthetic peptide
KFADDLNQL

SEQ ID NO: 11632 - protein, 9 aa, synthetic construct
  REGION 1..9: note = Description of Artificial Sequence: Synthetic peptide
KQGDDYVYL

SEQ ID NO: 11633 - protein, 9 aa, synthetic construct
  REGION 1..9: note = Description of Artificial Sequence: Synthetic peptide
KSVNITFEL

SEQ ID NO: 11634 - protein, 9 aa, synthetic construct
  REGION 1..9: note = Description of Artificial Sequence: Synthetic peptide
KTLQPVSEL

SEQ ID NO: 11635 - protein, 8 aa, synthetic construct
  REGION 1..8: note = Description of Artificial Sequence: Synthetic peptide
KTYERHSL

SEQ ID NO: 11636 - protein, 9 aa, synthetic construct
  REGION 1..9: note = Description of Artificial Sequence: Synthetic peptide
LAFVVFLLV

SEQ ID NO: 11637 - protein, 9 aa, synthetic construct
  REGION 1..9: note = Description of Artificial Sequence: Synthetic peptide
LMDGSIIQF

SEQ ID NO: 11638 - protein, 9 aa, synthetic construct
  REGION 1..9: note = Description of Artificial Sequence: Synthetic peptide
LSDDAVVCF

SEQ ID NO: 11639 - protein, 9 aa, synthetic construct
  REGION 1..9: note = Description of Artificial Sequence: Synthetic peptide
LSDRVVFVL

SEQ ID NO: 11640 - protein, 9 aa, synthetic construct
  REGION 1..9: note = Description of Artificial Sequence: Synthetic peptide
LTIKKPNEL

SEQ ID NO: 11641 - protein, 9 aa, synthetic construct
  REGION 1..9: note = Description of Artificial Sequence: Synthetic peptide
LTYTGAIKL

SEQ ID NO: 11642 - protein, 9 aa, synthetic construct
  REGION 1..9: note = Description of Artificial Sequence: Synthetic peptide
LVKPSFYVY

SEQ ID NO: 11643 - protein, 8 aa, synthetic construct
  REGION 1..8: note = Description of Artificial Sequence: Synthetic peptide
MEIDFLEL

SEQ ID NO: 11644 - protein, 9 aa, synthetic construct
  REGION 1..9: note = Description of Artificial Sequence: Synthetic peptide
MYASAVVLL

SEQ ID NO: 11645 - protein, 9 aa, synthetic construct
  REGION 1..9: note = Description of Artificial Sequence: Synthetic peptide
REVRTIKVF

SEQ ID NO: 11646 - protein, 9 aa, synthetic construct
  REGION 1..9: note = Description of Artificial Sequence: Synthetic peptide
RVDGQVDLF

SEQ ID NO: 11647 - protein, 9 aa, synthetic construct
  REGION 1..9: note = Description of Artificial Sequence: Synthetic peptide
SEFSSLPSY

SEQ ID NO: 11648 - protein, 9 aa, synthetic construct
  REGION 1..9: note = Description of Artificial Sequence: Synthetic peptide
SLPINVIVF

SEQ ID NO: 11649 - protein, 9 aa, synthetic construct
  REGION 1..9: note = Description of Artificial Sequence: Synthetic peptide
SSPDDQIGY

SEQ ID NO: 11650 - protein, 9 aa, synthetic construct
  REGION 1..9: note = Description of Artificial Sequence: Synthetic peptide
TQYNRYLAL

SEQ ID NO: 11651 - protein, 9 aa, synthetic construct
  REGION 1..9: note = Description of Artificial Sequence: Synthetic peptide
TVYSHLLLV

SEQ ID NO: 11652 - protein, 9 aa, synthetic construct
  REGION 1..9: note = Description of Artificial Sequence: Synthetic peptide
VAKSHNIAL

SEQ ID NO: 11653 - protein, 9 aa, synthetic construct
  REGION 1..9: note = Description of Artificial Sequence: Synthetic peptide
VENPDILRV

SEQ ID NO: 11654 - protein, 9 aa, synthetic construct
  REGION 1..9: note = Description of Artificial Sequence: Synthetic peptide
VLLSVLQQL

SEQ ID NO: 11655 - protein, 9 aa, synthetic construct
  REGION 1..9: note = Description of Artificial Sequence: Synthetic peptide
VVAFNTLLF

SEQ ID NO: 11656 - protein, 8 aa, synthetic construct
  REGION 1..8: note = Description of Artificial Sequence: Synthetic peptide
VVFNGVSF

SEQ ID NO: 11657 - protein, 9 aa, synthetic construct
  REGION 1..9: note = Description of Artificial Sequence: Synthetic peptide
YAKPFLNKV

SEQ ID NO: 11658 - protein, 9 aa, synthetic construct
  REGION 1..9: note = Description of Artificial Sequence: Synthetic peptide
YASAVVLLI

SEQ ID NO: 11659 - protein, 9 aa, synthetic construct
  REGION 1..9: note = Description of Artificial Sequence: Synthetic peptide
YTVELGTEV

SEQ ID NO: 11660 - protein, 9 aa, synthetic construct
  REGION 1..9: note = Description of Artificial Sequence: Synthetic peptide
CVADYSVLY

SEQ ID NO: 11661 - protein, 9 aa, synthetic construct
  REGION 1..9: note = Description of Artificial Sequence: Synthetic peptide
DAFKLNIKL

SEQ ID NO: 11662 - protein, 9 aa, synthetic construct
  REGION 1..9: note = Description of Artificial Sequence: Synthetic peptide
ELFENKTTL

SEQ ID NO: 11663 - protein, 8 aa, synthetic construct
  REGION 1..8: note = Description of Artificial Sequence: Synthetic peptide
FAMGIIAM

SEQ ID NO: 11664 - protein, 9 aa, synthetic construct
  REGION 1..9: note = Description of Artificial Sequence: Synthetic peptide
FASEAARVV

SEQ ID NO: 11665 - protein, 9 aa, synthetic construct
  REGION 1..9: note = Description of Artificial Sequence: Synthetic peptide
FLTENLLLY

SEQ ID NO: 11666 - protein, 9 aa, synthetic construct
  REGION 1..9: note = Description of Artificial Sequence: Synthetic peptide
GWLIVGVAL

SEQ ID NO: 11667 - protein, 9 aa, synthetic construct
  REGION 1..9: note = Description of Artificial Sequence: Synthetic peptide
HAFLCLFLL

SEQ ID NO: 11668 - protein, 8 aa, synthetic construct
  REGION 1..8: note = Description of Artificial Sequence: Synthetic peptide
IAFGGCVF

SEQ ID NO: 11669 - protein, 9 aa, synthetic construct
  REGION 1..9: note = Description of Artificial Sequence: Synthetic peptide
ICAPLTVFF

SEQ ID NO: 11670 - protein, 9 aa, synthetic construct
  REGION 1..9: note = Description of Artificial Sequence: Synthetic peptide
ISDEVARDL

SEQ ID NO: 11671 - protein, 9 aa, synthetic construct
  REGION 1..9: note = Description of Artificial Sequence: Synthetic peptide
KAYKIEELF

SEQ ID NO: 11672 - protein, 9 aa, synthetic construct
  REGION 1..9: note = Description of Artificial Sequence: Synthetic peptide
KEIDRLNEV

SEQ ID NO: 11673 - protein, 10 aa, synthetic construct
  REGION 1..10: note = Description of Artificial Sequence: Synthetic peptide
KEIKESVQTF

SEQ ID NO: 11674 - protein, 9 aa, synthetic construct
  REGION 1..9: note = Description of Artificial Sequence: Synthetic peptide
KHIDAYKTF

SEQ ID NO: 11675 - protein, 9 aa, synthetic construct
  REGION 1..9: note = Description of Artificial Sequence: Synthetic peptide
KLVNKFLAL

SEQ ID NO: 11676 - protein, 9 aa, synthetic construct
  REGION 1..9: note = Description of Artificial Sequence: Synthetic peptide
LAILTALRL

SEQ ID NO: 11677 - protein, 9 aa, synthetic construct
  REGION 1..9: note = Description of Artificial Sequence: Synthetic peptide
NIIIWFLLL

SEQ ID NO: 11678 - protein, 9 aa, synthetic construct
  REGION 1..9: note = Description of Artificial Sequence: Synthetic peptide
NTFTRLQSL

SEQ ID NO: 11679 - protein, 9 aa, synthetic construct
  REGION 1..9: note = Description of Artificial Sequence: Synthetic peptide
NVLEGSVAY

SEQ ID NO: 11680 - protein, 10 aa, synthetic construct
  REGION 1..10: note = Description of Artificial Sequence: Synthetic peptide
RIFTIGTVTL

SEQ ID NO: 11681 - protein, 9 aa, synthetic construct
  REGION 1..9: note = Description of Artificial Sequence: Synthetic peptide
RMYIFFASF

SEQ ID NO: 11682 - protein, 9 aa, synthetic construct
  REGION 1..9: note = Description of Artificial Sequence: Synthetic peptide
RVVFNGVSF

SEQ ID NO: 11683 - protein, 9 aa, synthetic construct
  REGION 1..9: note = Description of Artificial Sequence: Synthetic peptide
SAFYILPSI

SEQ ID NO: 11684 - protein, 9 aa, synthetic construct
  REGION 1..9: note = Description of Artificial Sequence: Synthetic peptide
SSSSDNIAL

SEQ ID NO: 11685 - protein, 9 aa, synthetic construct
  REGION 1..9: note = Description of Artificial Sequence: Synthetic peptide
TAFGLVAEW

SEQ ID NO: 11686 - protein, 9 aa, synthetic construct
  REGION 1..9: note = Description of Artificial Sequence: Synthetic peptide
TTIQTIVEV

SEQ ID NO: 11687 - protein, 9 aa, synthetic construct
  REGION 1..9: note = Description of Artificial Sequence: Synthetic peptide
VARDLSLQF

SEQ ID NO: 11688 - protein, 9 aa, synthetic construct
  REGION 1..9: note = Description of Artificial Sequence: Synthetic peptide
VPFWITIAY

SEQ ID NO: 11689 - protein, 9 aa, synthetic construct
  REGION 1..9: note = Description of Artificial Sequence: Synthetic peptide
VVYRGTTTY

SEQ ID NO: 11690 - protein, 9 aa, synthetic construct
  REGION 1..9: note = Description of Artificial Sequence: Synthetic peptide
VYDPLQPEL

SEQ ID NO: 11691 - protein, 8 aa, synthetic construct
  REGION 1..8: note = Description of Artificial Sequence: Synthetic peptide
YCYDTNVL

SEQ ID NO: 11692 - protein, 9 aa, synthetic construct
  REGION 1..9: note = Description of Artificial Sequence: Synthetic peptide
YTPSKLIEY

SEQ ID NO: 11693 - protein, 9 aa, synthetic construct
  REGION 1..9: note = Description of Artificial Sequence: Synthetic peptide
AMDEFIERY

SEQ ID NO: 11694 - protein, 9 aa, synthetic construct
  REGION 1..9: note = Description of Artificial Sequence: Synthetic peptide
DSKEGFFTY

SEQ ID NO: 11695 - protein, 8 aa, synthetic construct
  REGION 1..8: note = Description of Artificial Sequence: Synthetic peptide
FADDLNQL

SEQ ID NO: 11696 - protein, 9 aa, synthetic construct
  REGION 1..9: note = Description of Artificial Sequence: Synthetic peptide
FAVDAAKAY

SEQ ID NO: 11697 - protein, 8 aa, synthetic construct
  REGION 1..8: note = Description of Artificial Sequence: Synthetic peptide
FTIGTVTL

SEQ ID NO: 11698 - protein, 9 aa, synthetic construct
  REGION 1..9: note = Description of Artificial Sequence: Synthetic peptide
FTSDYYQLY

SEQ ID NO: 11699 - protein, 9 aa, synthetic construct
  REGION 1..9: note = Description of Artificial Sequence: Synthetic peptide
HANEYRLYL

SEQ ID NO: 11700 - protein, 9 aa, synthetic construct
  REGION 1..9: note = Description of Artificial Sequence: Synthetic peptide
LAYILFTRF

SEQ ID NO: 11701 - protein, 9 aa, synthetic construct
  REGION 1..9: note = Description of Artificial Sequence: Synthetic peptide
LITGRLQSL

SEQ ID NO: 11702 - protein, 9 aa, synthetic construct
  REGION 1..9: note = Description of Artificial Sequence: Synthetic peptide
RLNEVAKNL

SEQ ID NO: 11703 - protein, 9 aa, synthetic construct
  REGION 1..9: note = Description of Artificial Sequence: Synthetic peptide
SIIIGGAKL

SEQ ID NO: 11704 - protein, 9 aa, synthetic construct
  REGION 1..9: note = Description of Artificial Sequence: Synthetic peptide
TLNDLNETL

SEQ ID NO: 11705 - protein, 8 aa, synthetic construct
  REGION 1..8: note = Description of Artificial Sequence: Synthetic peptide
TTADIVVF

SEQ ID NO: 11706 - protein, 9 aa, synthetic construct
  REGION 1..9: note = Description of Artificial Sequence: Synthetic peptide
TTLPVNVAF

SEQ ID NO: 11707 - protein, 9 aa, synthetic construct
  REGION 1..9: note = Description of Artificial Sequence: Synthetic peptide
VRFPNITNL

SEQ ID NO: 11708 - protein, 9 aa, synthetic construct
  REGION 1..9: note = Description of Artificial Sequence: Synthetic peptide
YAFEHIVYG

SEQ ID NO: 11709 - protein, 9 aa, synthetic construct
  REGION 1..9: note = Description of Artificial Sequence: Synthetic peptide
YLITPVHVM

SEQ ID NO: 11710 - protein, 9 aa, synthetic construct
  REGION 1..9: note = Description of Artificial Sequence: Synthetic peptide
YVNTFSSTF

SEQ ID NO: 11711 - protein, 9 aa, synthetic construct
  REGION 1..9: note = Description of Artificial Sequence: Synthetic peptide
AIASEFSSL

SEQ ID NO: 11712 - protein, 8 aa, synthetic construct
  REGION 1..8: note = Description of Artificial Sequence: Synthetic peptide
FAFPFTIY

SEQ ID NO: 11713 - protein, 9 aa, synthetic construct
  REGION 1..9: note = Description of Artificial Sequence: Synthetic peptide
FCYMHHMEL

SEQ ID NO: 11714 - protein, 9 aa, synthetic construct
  REGION 1..9: note = Description of Artificial Sequence: Synthetic peptide
FVSEETGTL

SEQ ID NO: 11715 - protein, 9 aa, synthetic construct
  REGION 1..9: note = Description of Artificial Sequence: Synthetic peptide
FVVEVVDKY

SEQ ID NO: 11716 - protein, 8 aa, synthetic construct
  REGION 1..8: note = Description of Artificial Sequence: Synthetic peptide
GADPIHSL

SEQ ID NO: 11717 - protein, 9 aa, synthetic construct
  REGION 1..9: note = Description of Artificial Sequence: Synthetic peptide
KATEETFKL

SEQ ID NO: 11718 - protein, 9 aa, synthetic construct
  REGION 1..9: note = Description of Artificial Sequence: Synthetic peptide
LALSKGVHF

SEQ ID NO: 11719 - protein, 9 aa, synthetic construct
  REGION 1..9: note = Description of Artificial Sequence: Synthetic peptide
LVAEWFLAY

SEQ ID NO: 11720 - protein, 9 aa, synthetic construct
  REGION 1..9: note = Description of Artificial Sequence: Synthetic peptide
LVSDIDITF

SEQ ID NO: 11721 - protein, 9 aa, synthetic construct
  REGION 1..9: note = Description of Artificial Sequence: Synthetic peptide
SEVGPEHSL

SEQ ID NO: 11722 - protein, 9 aa, synthetic construct
  REGION 1..9: note = Description of Artificial Sequence: Synthetic peptide
SIIAYTMSL

SEQ ID NO: 11723 - protein, 9 aa, synthetic construct
  REGION 1..9: note = Description of Artificial Sequence: Synthetic peptide
SQLGGLHLL

SEQ ID NO: 11724 - protein, 9 aa, synthetic construct
  REGION 1..9: note = Description of Artificial Sequence: Synthetic peptide
STNVTIATY

SEQ ID NO: 11725 - protein, 9 aa, synthetic construct
  REGION 1..9: note = Description of Artificial Sequence: Synthetic peptide
SVVSKVVKV

SEQ ID NO: 11726 - protein, 9 aa, synthetic construct
  REGION 1..9: note = Description of Artificial Sequence: Synthetic peptide
TTNGDFLHF

SEQ ID NO: 11727 - protein, 9 aa, synthetic construct
  REGION 1..9: note = Description of Artificial Sequence: Synthetic peptide
AWPLIVTAL

SEQ ID NO: 11728 - protein, 9 aa, synthetic construct
  REGION 1..9: note = Description of Artificial Sequence: Synthetic peptide
FVCNLLLLF

SEQ ID NO: 11729 - protein, 9 aa, synthetic construct
  REGION 1..9: note = Description of Artificial Sequence: Synthetic peptide
FVFLVLLPL

SEQ ID NO: 11730 - protein, 9 aa, synthetic construct
  REGION 1..9: note = Description of Artificial Sequence: Synthetic peptide
HLVDFQVTI

SEQ ID NO: 11731 - protein, 9 aa, synthetic construct
  REGION 1..9: note = Description of Artificial Sequence: Synthetic peptide
HSIGFDYVY

SEQ ID NO: 11732 - protein, 9 aa, synthetic construct
  REGION 1..9: note = Description of Artificial Sequence: Synthetic peptide
IVNGVRRSF

SEQ ID NO: 11733 - protein, 9 aa, synthetic construct
  REGION 1..9: note = Description of Artificial Sequence: Synthetic peptide
KAIDGGVTR

SEQ ID NO: 11734 - protein, 8 aa, synthetic construct
  REGION 1..8: note = Description of Artificial Sequence: Synthetic peptide
LLMPILTL

SEQ ID NO: 11735 - protein, 9 aa, synthetic construct
  REGION 1..9: note = Description of Artificial Sequence: Synthetic peptide
LSFKELLVY

SEQ ID NO: 11736 - protein, 9 aa, synthetic construct
  REGION 1..9: note = Description of Artificial Sequence: Synthetic peptide
LWLLWPVTL

SEQ ID NO: 11737 - protein, 9 aa, synthetic construct
  REGION 1..9: note = Description of Artificial Sequence: Synthetic peptide
NVIPTITQM

SEQ ID NO: 11738 - protein, 9 aa, synthetic construct
  REGION 1..9: note = Description of Artificial Sequence: Synthetic peptide
QASLNGVTL

SEQ ID NO: 11739 - protein, 9 aa, synthetic construct
  REGION 1..9: note = Description of Artificial Sequence: Synthetic peptide
QSAPHGVVF

SEQ ID NO: 11740 - protein, 9 aa, synthetic construct
  REGION 1..9: note = Description of Artificial Sequence: Synthetic peptide
RTAPHGHVM

SEQ ID NO: 11741 - protein, 9 aa, synthetic construct
  REGION 1..9: note = Description of Artificial Sequence: Synthetic peptide
SLIDFYLCF

SEQ ID NO: 11742 - protein, 9 aa, synthetic construct
  REGION 1..9: note = Description of Artificial Sequence: Synthetic peptide
SSPDAVTAY

SEQ ID NO: 11743 - protein, 9 aa, synthetic construct
  REGION 1..9: note = Description of Artificial Sequence: Synthetic peptide
SVGPKQASL

SEQ ID NO: 11744 - protein, 9 aa, synthetic construct
  REGION 1..9: note = Description of Artificial Sequence: Synthetic peptide
TAQNSVRVL

SEQ ID NO: 11745 - protein, 9 aa, synthetic construct
  REGION 1..9: note = Description of Artificial Sequence: Synthetic peptide
TILDGISQY

SEQ ID NO: 11746 - protein, 9 aa, synthetic construct
  REGION 1..9: note = Description of Artificial Sequence: Synthetic peptide
TLDSKTQSL

SEQ ID NO: 11747 - protein, 9 aa, synthetic construct
  REGION 1..9: note = Description of Artificial Sequence: Synthetic peptide
VMVELVAEL

SEQ ID NO: 11748 - protein, 9 aa, synthetic construct
  REGION 1..9: note = Description of Artificial Sequence: Synthetic peptide
AAYVDNSSL

SEQ ID NO: 11749 - protein, 9 aa, synthetic construct
  REGION 1..9: note = Description of Artificial Sequence: Synthetic peptide
EYHDVRVVL

SEQ ID NO: 11750 - protein, 9 aa, synthetic construct
  REGION 1..9: note = Description of Artificial Sequence: Synthetic peptide
FAIGLALYY

SEQ ID NO: 11751 - protein, 9 aa, synthetic construct
  REGION 1..9: note = Description of Artificial Sequence: Synthetic peptide
HVGEIPVAY

SEQ ID NO: 11752 - protein, 9 aa, synthetic construct
  REGION 1..9: note = Description of Artificial Sequence: Synthetic peptide
KAYNVTQAF

SEQ ID NO: 11753 - protein, 9 aa, synthetic construct
  REGION 1..9: note = Description of Artificial Sequence: Synthetic peptide
KLFDRYFKY

SEQ ID NO: 11754 - protein, 8 aa, synthetic construct
  REGION 1..8: note = Description of Artificial Sequence: Synthetic peptide
KSAPLIEL

SEQ ID NO: 11755 - protein, 9 aa, synthetic construct
  REGION 1..9: note = Description of Artificial Sequence: Synthetic peptide
NSFSGYLKL

SEQ ID NO: 11756 - protein, 9 aa, synthetic construct
  REGION 1..9: note = Description of Artificial Sequence: Synthetic peptide
SLDNVLSTF

SEQ ID NO: 11757 - protein, 9 aa, synthetic construct
  REGION 1..9: note = Description of Artificial Sequence: Synthetic peptide
STVFPPTSF

SEQ ID NO: 11758 - protein, 9 aa, synthetic construct
  REGION 1..9: note = Description of Artificial Sequence: Synthetic peptide
TMADLVYAL

SEQ ID NO: 11759 - protein, 8 aa, synthetic construct
  REGION 1..8: note = Description of Artificial Sequence: Synthetic peptide
TVFPPTSF

SEQ ID NO: 11760 - protein, 9 aa, synthetic construct
  REGION 1..9: note = Description of Artificial Sequence: Synthetic peptide
VMYASAVVL

SEQ ID NO: 11761 - protein, 8 aa, synthetic construct
  REGION 1..8: note = Description of Artificial Sequence: Synthetic peptide
VVFLLVTL

SEQ ID NO: 11762 - protein, 8 aa, synthetic construct
  REGION 1..8: note = Description of Artificial Sequence: Synthetic peptide
YASAVVLL

SEQ ID NO: 11763 - protein, 9 aa, synthetic construct
  REGION 1..9: note = Description of Artificial Sequence: Synthetic peptide
GVYSVIYLY

SEQ ID NO: 11764 - protein, 9 aa, synthetic construct
  REGION 1..9: note = Description of Artificial Sequence: Synthetic peptide
ILFLALITL

SEQ ID NO: 11765 - protein, 8 aa, synthetic construct
  REGION 1..8: note = Description of Artificial Sequence: Synthetic peptide
KAYKIEEL

SEQ ID NO: 11766 - protein, 9 aa, synthetic construct
  REGION 1..9: note = Description of Artificial Sequence: Synthetic peptide
LAFLLFLVL

SEQ ID NO: 11767 - protein, 9 aa, synthetic construct
  REGION 1..9: note = Description of Artificial Sequence: Synthetic peptide
LANECAQVL

SEQ ID NO: 11768 - protein, 9 aa, synthetic construct
  REGION 1..9: note = Description of Artificial Sequence: Synthetic peptide
LLADKFPVL

SEQ ID NO: 11769 - protein, 8 aa, synthetic construct
  REGION 1..8: note = Description of Artificial Sequence: Synthetic peptide
SASKIITL

SEQ ID NO: 11770 - protein, 9 aa, synthetic construct
  REGION 1..9: note = Description of Artificial Sequence: Synthetic peptide
SHFAIGLAL

SEQ ID NO: 11771 - protein, 9 aa, synthetic construct
  REGION 1..9: note = Description of Artificial Sequence: Synthetic peptide
SSSDNIALL

SEQ ID NO: 11772 - protein, 9 aa, synthetic construct
  REGION 1..9: note = Description of Artificial Sequence: Synthetic peptide
SVIYLYLTF

SEQ ID NO: 11773 - protein, 9 aa, synthetic construct
  REGION 1..9: note = Description of Artificial Sequence: Synthetic peptide
TLKEILVTY

SEQ ID NO: 11774 - protein, 9 aa, synthetic construct
  REGION 1..9: note = Description of Artificial Sequence: Synthetic peptide
VAFNTLLFL

SEQ ID NO: 11775 - protein, 9 aa, synthetic construct
  REGION 1..9: note = Description of Artificial Sequence: Synthetic peptide
YADVFHLYL

SEQ ID NO: 11776 - protein, 8 aa, synthetic construct
  REGION 1..8: note = Description of Artificial Sequence: Synthetic peptide
YAFEHIVY

SEQ ID NO: 11777 - protein, 9 aa, synthetic construct
  REGION 1..9: note = Description of Artificial Sequence: Synthetic peptide
ANDPVGFTL

SEQ ID NO: 11778 - protein, 9 aa, synthetic construct
  REGION 1..9: note = Description of Artificial Sequence: Synthetic peptide
FVNEFYAYL

SEQ ID NO: 11779 - protein, 9 aa, synthetic construct
  REGION 1..9: note = Description of Artificial Sequence: Synthetic peptide
FVSDADSTL

SEQ ID NO: 11780 - protein, 9 aa, synthetic construct
  REGION 1..9: note = Description of Artificial Sequence: Synthetic peptide
HAASGNLLL

SEQ ID NO: 11781 - protein, 9 aa, synthetic construct
  REGION 1..9: note = Description of Artificial Sequence: Synthetic peptide
IVAGGIVAI

SEQ ID NO: 11782 - protein, 9 aa, synthetic construct
  REGION 1..9: note = Description of Artificial Sequence: Synthetic peptide
IVNSVLLFL

SEQ ID NO: 11783 - protein, 8 aa, synthetic construct
  REGION 1..8: note = Description of Artificial Sequence: Synthetic peptide
SLIDLQEL

SEQ ID NO: 11784 - protein, 9 aa, synthetic construct
  REGION 1..9: note = Description of Artificial Sequence: Synthetic peptide
VLNDILSRL

SEQ ID NO: 11785 - protein, 9 aa, synthetic construct
  REGION 1..9: note = Description of Artificial Sequence: Synthetic peptide
VVIPDYNTY

SEQ ID NO: 11786 - protein, 9 aa, synthetic construct
  REGION 1..9: note = Description of Artificial Sequence: Synthetic peptide
YFFTLLLQL

SEQ ID NO: 11787 - protein, 9 aa, synthetic construct
  REGION 1..9: note = Description of Artificial Sequence: Synthetic peptide
YVYSRVKNL

SEQ ID NO: 11788 - protein, 9 aa, synthetic construct
  REGION 1..9: note = Description of Artificial Sequence: Synthetic peptide
DADSKIVQL

SEQ ID NO: 11789 - protein, 9 aa, synthetic construct
  REGION 1..9: note = Description of Artificial Sequence: Synthetic peptide
IIFWFSLEL

SEQ ID NO: 11790 - protein, 9 aa, synthetic construct
  REGION 1..9: note = Description of Artificial Sequence: Synthetic peptide
KSFDLGDEL

SEQ ID NO: 11791 - protein, 9 aa, synthetic construct
  REGION 1..9: note = Description of Artificial Sequence: Synthetic peptide
QSASKIITL

SEQ ID NO: 11792 - protein, 9 aa, synthetic construct
  REGION 1..9: note = Description of Artificial Sequence: Synthetic peptide
SAFVNLKQL

SEQ ID NO: 11793 - protein, 9 aa, synthetic construct
  REGION 1..9: note = Description of Artificial Sequence: Synthetic peptide
SAPHGVVFL

SEQ ID NO: 11794 - protein, 9 aa, synthetic construct
  REGION 1..9: note = Description of Artificial Sequence: Synthetic peptide
SAQTGIAVL

SEQ ID NO: 11795 - protein, 9 aa, synthetic construct
  REGION 1..9: note = Description of Artificial Sequence: Synthetic peptide
SLLMPILTL

SEQ ID NO: 11796 - protein, 9 aa, synthetic construct
  REGION 1..9: note = Description of Artificial Sequence: Synthetic peptide
VADAVIKTL

SEQ ID NO: 11797 - protein, 9 aa, synthetic construct
  REGION 1..9: note = Description of Artificial Sequence: Synthetic peptide
YVFCTVNAL

SEQ ID NO: 11798 - protein, 9 aa, synthetic construct
  REGION 1..9: note = Description of Artificial Sequence: Synthetic peptide
AGIVGVLTL

SEQ ID NO: 11799 - protein, 9 aa, synthetic construct
  REGION 1..9: note = Description of Artificial Sequence: Synthetic peptide
AMYTPHTVL

SEQ ID NO: 11800 - protein, 9 aa, synthetic construct
  REGION 1..9: note = Description of Artificial Sequence: Synthetic peptide
AQLPAPRTL

SEQ ID NO: 11801 - protein, 10 aa, synthetic construct
  REGION 1..10: note = Description of Artificial Sequence: Synthetic peptide
FAFPFTIYSL

SEQ ID NO: 11802 - protein, 9 aa, synthetic construct
  REGION 1..9: note = Description of Artificial Sequence: Synthetic peptide
GVAPGTAVL

SEQ ID NO: 11803 - protein, 9 aa, synthetic construct
  REGION 1..9: note = Description of Artificial Sequence: Synthetic peptide
HLDGEVITF

SEQ ID NO: 11804 - protein, 9 aa, synthetic construct
  REGION 1..9: note = Description of Artificial Sequence: Synthetic peptide
KLINIIIWF

SEQ ID NO: 11805 - protein, 9 aa, synthetic construct
  REGION 1..9: note = Description of Artificial Sequence: Synthetic peptide
KVDGVDVEL

SEQ ID NO: 11806 - protein, 9 aa, synthetic construct
  REGION 1..9: note = Description of Artificial Sequence: Synthetic peptide
QINDMILSL

SEQ ID NO: 11807 - protein, 9 aa, synthetic construct
  REGION 1..9: note = Description of Artificial Sequence: Synthetic peptide
SALEPLVDL

SEQ ID NO: 11808 - protein, 9 aa, synthetic construct
  REGION 1..9: note = Description of Artificial Sequence: Synthetic peptide
YQPYRVVVL

SEQ ID NO: 11809 - protein, 9 aa, synthetic construct
  REGION 1..9: note = Description of Artificial Sequence: Synthetic peptide
EAFEKMVSL

SEQ ID NO: 11810 - protein, 9 aa, synthetic construct
  REGION 1..9: note = Description of Artificial Sequence: Synthetic peptide
FVVFLLVTL

SEQ ID NO: 11811 - protein, 9 aa, synthetic construct
  REGION 1..9: note = Description of Artificial Sequence: Synthetic peptide
HSSGVTREL

SEQ ID NO: 11812 - protein, 9 aa, synthetic construct
  REGION 1..9: note = Description of Artificial Sequence: Synthetic peptide
LMIERFVSL

SEQ ID NO: 11813 - protein, 9 aa, synthetic construct
  REGION 1..9: note = Description of Artificial Sequence: Synthetic peptide
TVASLINTL

SEQ ID NO: 11814 - protein, 9 aa, synthetic construct
  REGION 1..9: note = Description of Artificial Sequence: Synthetic peptide
HVISTSHKL

SEQ ID NO: 11815 - protein, 9 aa, synthetic construct
  REGION 1..9: note = Description of Artificial Sequence: Synthetic peptide
ITFDNLKTL

SEQ ID NO: 11816 - protein, 9 aa, synthetic construct
  REGION 1..9: note = Description of Artificial Sequence: Synthetic peptide
SFYEDFLEY

SEQ ID NO: 11817 - protein, 9 aa, synthetic construct
  REGION 1..9: note = Description of Artificial Sequence: Synthetic peptide
YLATALLTL

SEQ ID NO: 11818 - protein, 9 aa, synthetic construct
  REGION 1..9: note = Description of Artificial Sequence: Synthetic peptide
VAAIVFITL

SEQ ID NO: 11819 - protein, 9 aa, synthetic construct
  REGION 1..9: note = Description of Artificial Sequence: Synthetic peptide
KVDGVVQQL

SEQ ID NO: 11820 - protein, 9 aa, synthetic construct
  REGION 1..9: note = Description of Artificial Sequence: Synthetic peptide
ATIPIQASL

SEQ ID NO: 11821 - protein, 9 aa, synthetic construct
  REGION 1..9: note = Description of Artificial Sequence: Synthetic peptide
YITGGVVQL

SEQ ID NO: 11822 - protein, 9 aa, synthetic construct
  REGION 1..9: note = Description of Artificial Sequence: Synthetic peptide
ALRLVDPQI

SEQ ID NO: 11823 - protein, 8 aa, synthetic construct
  REGION 1..8: note = Description of Artificial Sequence: Synthetic peptide
EELPDEFV

SEQ ID NO: 11824 - protein, 8 aa, synthetic construct
  REGION 1..8: note = Description of Artificial Sequence: Synthetic peptide
ELPDEFVV

SEQ ID NO: 11825 - protein, 8 aa, synthetic construct
  REGION 1..8: note = Description of Artificial Sequence: Synthetic peptide
EMHPALRL

SEQ ID NO: 11826 - protein, 8 aa, synthetic construct
  REGION 1..8: note = Description of Artificial Sequence: Synthetic peptide
GPKVYPII

SEQ ID NO: 11827 - protein, 10 aa, synthetic construct
  REGION 1..10: note = Description of Artificial Sequence: Synthetic peptide
GPKVYPIILR

SEQ ID NO: 11828 - protein, 10 aa, synthetic construct
  REGION 1..10: note = Description of Artificial Sequence: Synthetic peptide
GRDQNNVGPK

SEQ ID NO: 11829 - protein, 11 aa, synthetic construct
  REGION 1..11: note = Description of Artificial Sequence: Synthetic peptide
GRDQNNVGPKV

SEQ ID NO: 11830 - protein, 8 aa, synthetic construct
  REGION 1..8: note = Description of Artificial Sequence: Synthetic peptide
ILRLGSPL

SEQ ID NO: 11831 - protein, 8 aa, synthetic construct
  REGION 1..8: note = Description of Artificial Sequence: Synthetic peptide
IQLAVTRM

SEQ ID NO: 11832 - protein, 9 aa, synthetic construct
  REGION 1..9: note = Description of Artificial Sequence: Synthetic peptide
ISEMHPALR

SEQ ID NO: 11833 - protein, 8 aa, synthetic construct
  REGION 1..8: note = Description of Artificial Sequence: Synthetic peptide
KTLNSLED

SEQ ID NO: 11834 - protein, 11 aa, synthetic construct
  REGION 1..11: note = Description of Artificial Sequence: Synthetic peptide
KTLNSLEDKAF

SEQ ID NO: 11835 - protein, 11 aa, synthetic construct
  REGION 1..11: note = Description of Artificial Sequence: Synthetic peptide
LATTEELPDEF

SEQ ID NO: 11836 - protein, 9 aa, synthetic construct
  REGION 1..9: note = Description of Artificial Sequence: Synthetic peptide
LEDKAFQLT

SEQ ID NO: 11837 - protein, 8 aa, synthetic construct
  REGION 1..8: note = Description of Artificial Sequence: Synthetic peptide
LNMARKTL

SEQ ID NO: 11838 - protein, 11 aa, synthetic construct
  REGION 1..11: note = Description of Artificial Sequence: Synthetic peptide
LPDEFVVVTVK

SEQ ID NO: 11839 - protein, 10 aa, synthetic construct
  REGION 1..10: note = Description of Artificial Sequence: Synthetic peptide
LRLGSPLSLN

SEQ ID NO: 11840 - protein, 11 aa, synthetic construct
  REGION 1..11: note = Description of Artificial Sequence: Synthetic peptide
LRLGSPLSLNM

SEQ ID NO: 11841 - protein, 9 aa, synthetic construct
  REGION 1..9: note = Description of Artificial Sequence: Synthetic peptide
LRLVDPQIQ

SEQ ID NO: 11842 - protein, 10 aa, synthetic construct
  REGION 1..10: note = Description of Artificial Sequence: Synthetic peptide
LRLVDPQIQL

SEQ ID NO: 11843 - protein, 9 aa, synthetic construct
  REGION 1..9: note = Description of Artificial Sequence: Synthetic peptide
LSLNMARKT

SEQ ID NO: 11844 - protein, 9 aa, synthetic construct
  REGION 1..9: note = Description of Artificial Sequence: Synthetic peptide
NAVGRDQNN

SEQ ID NO: 11845 - protein, 10 aa, synthetic construct
  REGION 1..10: note = Description of Artificial Sequence: Synthetic peptide
NMARKTLNSL

SEQ ID NO: 11846 - protein, 8 aa, synthetic construct
  REGION 1..8: note = Description of Artificial Sequence: Synthetic peptide
NNVGPKVY

SEQ ID NO: 11847 - protein, 9 aa, synthetic construct
  REGION 1..9: note = Description of Artificial Sequence: Synthetic peptide
NNVGPKVYP

SEQ ID NO: 11848 - protein, 8 aa, synthetic construct
  REGION 1..8: note = Description of Artificial Sequence: Synthetic peptide
NSLEDKAF

SEQ ID NO: 11849 - protein, 9 aa, synthetic construct
  REGION 1..9: note = Description of Artificial Sequence: Synthetic peptide
NVGPKVYPI

SEQ ID NO: 11850 - protein, 11 aa, synthetic construct
  REGION 1..11: note = Description of Artificial Sequence: Synthetic peptide
NVGPKVYPIIL

SEQ ID NO: 11851 - protein, 12 aa, synthetic construct
  REGION 1..12: note = Description of Artificial Sequence: Synthetic peptide
NVGPKVYPIILR

SEQ ID NO: 11852 - protein, 9 aa, synthetic construct
  REGION 1..9: note = Description of Artificial Sequence: Synthetic peptide
PKVYPIILR

SEQ ID NO: 11853 - protein, 8 aa, synthetic construct
  REGION 1..8: note = Description of Artificial Sequence: Synthetic peptide
QIQLAVTR

SEQ ID NO: 11854 - protein, 8 aa, synthetic construct
  REGION 1..8: note = Description of Artificial Sequence: Synthetic peptide
QNNVGPKV

SEQ ID NO: 11855 - protein, 9 aa, synthetic construct
  REGION 1..9: note = Description of Artificial Sequence: Synthetic peptide
QNNVGPKVY

SEQ ID NO: 11856 - protein, 8 aa, synthetic construct
  REGION 1..8: note = Description of Artificial Sequence: Synthetic peptide
RDQNNVGP

SEQ ID NO: 11857 - protein, 11 aa, synthetic construct
  REGION 1..11: note = Description of Artificial Sequence: Synthetic peptide
RDQNNVGPKVY

SEQ ID NO: 11858 - protein, 9 aa, synthetic construct
  REGION 1..9: note = Description of Artificial Sequence: Synthetic peptide
RKTLNSLED

SEQ ID NO: 11859 - protein, 9 aa, synthetic construct
  REGION 1..9: note = Description of Artificial Sequence: Synthetic peptide
RLGSPLSLN

SEQ ID NO: 11860 - protein, 10 aa, synthetic construct
  REGION 1..10: note = Description of Artificial Sequence: Synthetic peptide
RLGSPLSLNM

SEQ ID NO: 11861 - protein, 10 aa, synthetic construct
  REGION 1..10: note = Description of Artificial Sequence: Synthetic peptide
TTEELPDEFV

SEQ ID NO: 11862 - protein, 9 aa, synthetic construct
  REGION 1..9: note = Description of Artificial Sequence: Synthetic peptide
VGPKVYPII

SEQ ID NO: 11863 - protein, 8 aa, synthetic construct
  REGION 1..8: note = Description of Artificial Sequence: Synthetic peptide
VGRDQNNV

SEQ ID NO: 11864 - protein, 8 aa, synthetic construct
  REGION 1..8: note = Description of Artificial Sequence: Synthetic peptide
YPIILRLG

SEQ ID NO: 11865 - protein, 9 aa, synthetic construct
  REGION 1..9: note = Description of Artificial Sequence: Synthetic peptide
YPIILRLGS

SEQ ID NO: 11866 - protein, 10 aa, synthetic construct
  REGION 1..10: note = Description of Artificial Sequence: Synthetic peptide
YPIILRLGSP

SEQ ID NO: 11867 - protein, 11 aa, synthetic construct
  REGION 1..11: note = Description of Artificial Sequence: Synthetic peptide
YPIILRLGSPL

SEQ ID NO: 11868 - protein, 9 aa, synthetic construct
  REGION 1..9: note = Description of Artificial Sequence: Synthetic peptide
DQNNVGPKV

SEQ ID NO: 11869 - protein, 10 aa, synthetic construct
  REGION 1..10: note = Description of Artificial Sequence: Synthetic peptide
DQNNVGPKVY

SEQ ID NO: 11870 - protein, 9 aa, synthetic construct
  REGION 1..9: note = Description of Artificial Sequence: Synthetic peptide
EDKAFQLTP

SEQ ID NO: 11871 - protein, 11 aa, synthetic construct
  REGION 1..11: note = Description of Artificial Sequence: Synthetic peptide
EELPDEFVVVT

SEQ ID NO: 11872 - protein, 11 aa, synthetic construct
  REGION 1..11: note = Description of Artificial Sequence: Synthetic peptide
GPKVYPIILRL

SEQ ID NO: 11873 - protein, 9 aa, synthetic construct
  REGION 1..9: note = Description of Artificial Sequence: Synthetic peptide
GRDQNNVGP

SEQ ID NO: 11874 - protein, 9 aa, synthetic construct
  REGION 1..9: note = Description of Artificial Sequence: Synthetic peptide
IILRLGSPL

SEQ ID NO: 11875 - protein, 10 aa, synthetic construct
  REGION 1..10: note = Description of Artificial Sequence: Synthetic peptide
ILRLGSPLSL

SEQ ID NO: 11876 - protein, 9 aa, synthetic construct
  REGION 1..9: note = Description of Artificial Sequence: Synthetic peptide
KAFQLTPIA

SEQ ID NO: 11877 - protein, 10 aa, synthetic construct
  REGION 1..10: note = Description of Artificial Sequence: Synthetic peptide
KISEMHPALR

SEQ ID NO: 11878 - protein, 11 aa, synthetic construct
  REGION 1..11: note = Description of Artificial Sequence: Synthetic peptide
KISEMHPALRL

SEQ ID NO: 11879 - protein, 8 aa, synthetic construct
  REGION 1..8: note = Description of Artificial Sequence: Synthetic peptide
MDPKISEM

SEQ ID NO: 11880 - protein, 10 aa, synthetic construct
  REGION 1..10: note = Description of Artificial Sequence: Synthetic peptide
NSLEDKAFQL

SEQ ID NO: 11881 - protein, 9 aa, synthetic construct
  REGION 1..9: note = Description of Artificial Sequence: Synthetic peptide
QLTPIAVQM

SEQ ID NO: 11882 - protein, 8 aa, synthetic construct
  REGION 1..8: note = Description of Artificial Sequence: Synthetic peptide
RMENAVGR

SEQ ID NO: 11883 - protein, 8 aa, synthetic construct
  REGION 1..8: note = Description of Artificial Sequence: Synthetic peptide
SPLSLNMA

SEQ ID NO: 11884 - protein, 9 aa, synthetic construct
  REGION 1..9: note = Description of Artificial Sequence: Synthetic peptide
TKLATTEEL

SEQ ID NO: 11885 - protein, 9 aa, synthetic construct
  REGION 1..9: note = Description of Artificial Sequence: Synthetic peptide
TPIAVQMTK

SEQ ID NO: 11886 - protein, 9 aa, synthetic construct
  REGION 1..9: note = Description of Artificial Sequence: Synthetic peptide
VDPQIQLAV

SEQ ID NO: 11887 - protein, 10 aa, synthetic construct
  REGION 1..10: note = Description of Artificial Sequence: Synthetic peptide
VTRMENAVGR

SEQ ID NO: 11888 - protein, 9 aa, synthetic construct
  REGION 1..9: note = Description of Artificial Sequence: Synthetic peptide
DEFVVVTVK

SEQ ID NO: 11889 - protein, 8 aa, synthetic construct
  REGION 1..8: note = Description of Artificial Sequence: Synthetic peptide
FQLTPIAV

SEQ ID NO: 11890 - protein, 9 aa, synthetic construct
  REGION 1..9: note = Description of Artificial Sequence: Synthetic peptide
HPALRLVDP

SEQ ID NO: 11891 - protein, 10 aa, synthetic construct
  REGION 1..10: note = Description of Artificial Sequence: Synthetic peptide
ISEMHPALRL

SEQ ID NO: 11892 - protein, 8 aa, synthetic construct
  REGION 1..8: note = Description of Artificial Sequence: Synthetic peptide
KLATTEEL

SEQ ID NO: 11893 - protein, 9 aa, synthetic construct
  REGION 1..9: note = Description of Artificial Sequence: Synthetic peptide
KTLNSLEDK

SEQ ID NO: 11894 - protein, 10 aa, synthetic construct
  REGION 1..10: note = Description of Artificial Sequence: Synthetic peptide
LEDKAFQLTP

SEQ ID NO: 11895 - protein, 10 aa, synthetic construct
  REGION 1..10: note = Description of Artificial Sequence: Synthetic peptide
LVDPQIQLAV

SEQ ID NO: 11896 - protein, 8 aa, synthetic construct
  REGION 1..8: note = Description of Artificial Sequence: Synthetic peptide
MHPALRLV

SEQ ID NO: 11897 - protein, 9 aa, synthetic construct
  REGION 1..9: note = Description of Artificial Sequence: Synthetic peptide
PQIQLAVTR

SEQ ID NO: 11898 - protein, 10 aa, synthetic construct
  REGION 1..10: note = Description of Artificial Sequence: Synthetic peptide
RLVDPQIQLA

SEQ ID NO: 11899 - protein, 9 aa, synthetic construct
  REGION 1..9: note = Description of Artificial Sequence: Synthetic peptide
SPLSLNMAR

SEQ ID NO: 11900 - protein, 8 aa, synthetic construct
  REGION 1..8: note = Description of Artificial Sequence: Synthetic peptide
TEELPDEF

SEQ ID NO: 11901 - protein, 10 aa, synthetic construct
  REGION 1..10: note = Description of Artificial Sequence: Synthetic peptide
VGPKVYPIIL

SEQ ID NO: 11902 - protein, 9 aa, synthetic construct
  REGION 1..9: note = Description of Artificial Sequence: Synthetic peptide
VYPIILRLG

SEQ ID NO: 11903 - protein, 9 aa, synthetic construct
  REGION 1..9: note = Description of Artificial Sequence: Synthetic peptide
AFQLTPIAV

SEQ ID NO: 11904 - protein, 10 aa, synthetic construct
  REGION 1..10: note = Description of Artificial Sequence: Synthetic peptide
ATTEELPDEF

SEQ ID NO: 11905 - protein, 8 aa, synthetic construct
  REGION 1..8: note = Description of Artificial Sequence: Synthetic peptide
DPQIQLAV

SEQ ID NO: 11906 - protein, 9 aa, synthetic construct
  REGION 1..9: note = Description of Artificial Sequence: Synthetic peptide
EMHPALRLV

SEQ ID NO: 11907 - protein, 9 aa, synthetic construct
  REGION 1..9: note = Description of Artificial Sequence: Synthetic peptide
GPKVYPIIL

SEQ ID NO: 11908 - protein, 8 aa, synthetic construct
  REGION 1..8: note = Description of Artificial Sequence: Synthetic peptide
HPALRLVD

SEQ ID NO: 11909 - protein, 10 aa, synthetic construct
  REGION 1..10: note = Description of Artificial Sequence: Synthetic peptide
KVYPIILRLG

SEQ ID NO: 11910 - protein, 9 aa, synthetic construct
  REGION 1..9: note = Description of Artificial Sequence: Synthetic peptide
TEELPDEFV

SEQ ID NO: 11911 - protein, 10 aa, synthetic construct
  REGION 1..10: note = Description of Artificial Sequence: Synthetic peptide
TEELPDEFVV

SEQ ID NO: 11912 - protein, 11 aa, synthetic construct
  REGION 1..11: note = Description of Artificial Sequence: Synthetic peptide
TEELPDEFVVV

SEQ ID NO: 11913 - protein, 8 aa, synthetic construct
  REGION 1..8: note = Description of Artificial Sequence: Synthetic peptide
ARKTLNSL

SEQ ID NO: 11914 - protein, 11 aa, synthetic construct
  REGION 1..11: note = Description of Artificial Sequence: Synthetic peptide
ELPDEFVVVTV

SEQ ID NO: 11915 - protein, 10 aa, synthetic construct
  REGION 1..10: note = Description of Artificial Sequence: Synthetic peptide
KAFQLTPIAV

SEQ ID NO: 11916 - protein, 8 aa, synthetic construct
  REGION 1..8: note = Description of Artificial Sequence: Synthetic peptide
LEDKAFQL

SEQ ID NO: 11917 - protein, 9 aa, synthetic construct
  REGION 1..9: note = Description of Artificial Sequence: Synthetic peptide
LVDPQIQLA

SEQ ID NO: 11918 - protein, 10 aa, synthetic construct
  REGION 1..10: note = Description of Artificial Sequence: Synthetic peptide
TPIAVQMTKL

SEQ ID NO: 11919 - protein, 9 aa, synthetic construct
  REGION 1..9: note = Description of Artificial Sequence: Synthetic peptide
TRMENAVGR

SEQ ID NO: 11920 - protein, 8 aa, synthetic construct
  REGION 1..8: note = Description of Artificial Sequence: Synthetic peptide
ISEMHPAL

SEQ ID NO: 11921 - protein, 10 aa, synthetic construct
  REGION 1..10: note = Description of Artificial Sequence: Synthetic peptide
SEMHPALRLV

SEQ ID NO: 11922 - protein, 9 aa, synthetic construct
  REGION 1..9: note = Description of Artificial Sequence: Synthetic peptide
SLNMARKTL

SEQ ID NO: 11923 - protein, 8 aa, synthetic construct
  REGION 1..8: note = Description of Artificial Sequence: Synthetic peptide
KVYPIILR

SEQ ID NO: 11924 - protein, 9 aa, synthetic construct
  REGION 1..9: note = Description of Artificial Sequence: Synthetic peptide
MARKTLNSL

SEQ ID NO: 11925 - protein, 9 aa, synthetic construct
  REGION 1..9: note = Description of Artificial Sequence: Synthetic peptide
SLEDKAFQL

SEQ ID NO: 11926 - protein, 8 aa, synthetic construct
  REGION 1..8: note = Description of Artificial Sequence: Synthetic peptide
DEFVVVTV

SEQ ID NO: 11927 - protein, 9 aa, synthetic construct
  REGION 1..9: note = Description of Artificial Sequence: Synthetic peptide
EELPDEFVV

SEQ ID NO: 11928 - protein, 8 aa, synthetic construct
  REGION 1..8: note = Description of Artificial Sequence: Synthetic peptide
IAVQMTKL

SEQ ID NO: 11929 - protein, 9 aa, synthetic construct
  REGION 1..9: note = Description of Artificial Sequence: Synthetic peptide
LPDEFVVVT

SEQ ID NO: 11930 - protein, 10 aa, synthetic construct
  REGION 1..10: note = Description of Artificial Sequence: Synthetic peptide
LPDEFVVVTV

SEQ ID NO: 11931 - protein, 10 aa, synthetic construct
  REGION 1..10: note = Description of Artificial Sequence: Synthetic peptide
EELPDEFVVV

SEQ ID NO: 11932 - protein, 8 aa, synthetic construct
  REGION 1..8: note = Description of Artificial Sequence: Synthetic peptide
RLGSPLSL

SEQ ID NO: 11933 - protein, 9 aa, synthetic construct
  REGION 1..9: note = Description of Artificial Sequence: Synthetic peptide
SEMHPALRL

SEQ ID NO: 11934 - protein, 9 aa, synthetic construct
  REGION 1..9: note = Description of Artificial Sequence: Synthetic peptide
ELPDEFVVV

SEQ ID NO: 11935 - protein, 8 aa, synthetic construct
  REGION 1..8: note = Description of Artificial Sequence: Synthetic peptide
LVDPQIQL

SEQ ID NO: 11936 - protein, 9 aa, synthetic construct
  REGION 1..9: note = Description of Artificial Sequence: Synthetic peptide
TTEELPDEF

SEQ ID NO: 11937 - protein, 8 aa, synthetic construct
  REGION 1..8: note = Description of Artificial Sequence: Synthetic peptide
VYPIILRL

SEQ ID NO: 11938 - protein, 9 aa, synthetic construct
  REGION 1..9: note = Description of Artificial Sequence: Synthetic peptide
LRLGSPLSL

SEQ ID NO: 11939 - protein, 9 aa, synthetic construct
  REGION 1..9: note = Description of Artificial Sequence: Synthetic peptide
KISEMHPAL

SEQ ID NO: 11940 - protein, 8 aa, synthetic construct
  REGION 1..8: note = Description of Artificial Sequence: Synthetic peptide
LPDEFVVV

SEQ ID NO: 11941 - protein, 9 aa, synthetic construct
  REGION 1..9: note = Description of Artificial Sequence: Synthetic peptide
RLVDPQIQL

SEQ ID NO: 11942 - protein, 9 aa, synthetic construct
  REGION 1..9: note = Description of Artificial Sequence: Synthetic peptide
KVYPIILRL

SEQ ID NO: 11943 - protein, 25 aa, synthetic construct
  REGION 1..25: note = Description of Artificial Sequence: Synthetic peptide
RGPEQTQGNFGDQELIRQGTDYKHW

SEQ ID NO: 11944 - protein, 25 aa, synthetic construct
  REGION 1..25: note = Description of Artificial Sequence: Synthetic peptide
GPEQTQGNFGDQELIRQGTDYKHWP

SEQ ID NO: 11945 - protein, 25 aa, synthetic construct
  REGION 1..25: note = Description of Artificial Sequence: Synthetic peptide
LLNVPLHGTILTRPLLESELVIGAV

SEQ ID NO: 11946 - protein, 25 aa, synthetic construct
  REGION 1..25: note = Description of Artificial Sequence: Synthetic peptide
TSSIVITSGDGTTSPISEHDYQIGG

SEQ ID NO: 11947 - protein, 25 aa, synthetic construct
  REGION 1..25: note = Description of Artificial Sequence: Synthetic peptide
NILLNVPLHGTILTRPLLESELVIG

SEQ ID NO: 11948 - protein, 25 aa, synthetic construct
  REGION 1..25: note = Description of Artificial Sequence: Synthetic peptide
VTSSIVITSGDGTTSPISEHDYQIG

SEQ ID NO: 11949 - protein, 25 aa, synthetic construct
  REGION 1..25: note = Description of Artificial Sequence: Synthetic peptide
SSIVITSGDGTTSPISEHDYQIGGY

SEQ ID NO: 11950 - protein, 25 aa, synthetic construct
  REGION 1..25: note = Description of Artificial Sequence: Synthetic peptide
SVTSSIVITSGDGTTSPISEHDYQI

SEQ ID NO: 11951 - protein, 25 aa, synthetic construct
  REGION 1..25: note = Description of Artificial Sequence: Synthetic peptide
ILLNVPLHGTILTRPLLESELVIGA

SEQ ID NO: 11952 - protein, 25 aa, synthetic construct
  REGION 1..25: note = Description of Artificial Sequence: Synthetic peptide
VPLHGTILTRPLLESELVIGAVILR

SEQ ID NO: 11953 - protein, 25 aa, synthetic construct
  REGION 1..25: note = Description of Artificial Sequence: Synthetic peptide
SIVITSGDGTTSPISEHDYQIGGYT

SEQ ID NO: 11954 - protein, 25 aa, synthetic construct
  REGION 1..25: note = Description of Artificial Sequence: Synthetic peptide
LNVPLHGTILTRPLLESELVIGAVI

SEQ ID NO: 11955 - protein, 25 aa, synthetic construct
  REGION 1..25: note = Description of Artificial Sequence: Synthetic peptide
IVITSGDGTTSPISEHDYQIGGYTE

SEQ ID NO: 11956 - protein, 25 aa, synthetic construct
  REGION 1..25: note = Description of Artificial Sequence: Synthetic peptide
NVPLHGTILTRPLLESELVIGAVIL

SEQ ID NO: 11957 - protein, 25 aa, synthetic construct
  REGION 1..25: note = Description of Artificial Sequence: Synthetic peptide
FVSGNCDVVIGIVNNTVYDPLQPEL

SEQ ID NO: 11958 - protein, 25 aa, synthetic construct
  REGION 1..25: note = Description of Artificial Sequence: Synthetic peptide
VATEGALNTPKDHIGTRNPANNAAI

SEQ ID NO: 11959 - protein, 25 aa, synthetic construct
  REGION 1..25: note = Description of Artificial Sequence: Synthetic peptide
TFVSGNCDVVIGIVNNTVYDPLQPE

SEQ ID NO: 11960 - protein, 25 aa, synthetic construct
  REGION 1..25: note = Description of Artificial Sequence: Synthetic peptide
NTFVSGNCDVVIGIVNNTVYDPLQP

SEQ ID NO: 11961 - protein, 25 aa, synthetic construct
  REGION 1..25: note = Description of Artificial Sequence: Synthetic peptide
IWVATEGALNTPKDHIGTRNPANNA

SEQ ID NO: 11962 - protein, 25 aa, synthetic construct
  REGION 1..25: note = Description of Artificial Sequence: Synthetic peptide
WVATEGALNTPKDHIGTRNPANNAA

SEQ ID NO: 11963 - protein, 25 aa, synthetic construct
  REGION 1..25: note = Description of Artificial Sequence: Synthetic peptide
TEGALNTPKDHIGTRNPANNAAIVL

SEQ ID NO: 11964 - protein, 25 aa, synthetic construct
  REGION 1..25: note = Description of Artificial Sequence: Synthetic peptide
VSGNCDVVIGIVNNTVYDPLQPELD

SEQ ID NO: 11965 - protein, 25 aa, synthetic construct
  REGION 1..25: note = Description of Artificial Sequence: Synthetic peptide
ATEGALNTPKDHIGTRNPANNAAIV

SEQ ID NO: 11966 - protein, 25 aa, synthetic construct
  REGION 1..25: note = Description of Artificial Sequence: Synthetic peptide
KHFFFAQDGNAAISDYDYYRYNLPT

SEQ ID NO: 11967 - protein, 25 aa, synthetic construct
  REGION 1..25: note = Description of Artificial Sequence: Synthetic peptide
FFAQDGNAAISDYDYYRYNLPTMCD

SEQ ID NO: 11968 - protein, 25 aa, synthetic construct
  REGION 1..25: note = Description of Artificial Sequence: Synthetic peptide
YQIGGYTEKWESGVKDCVVLHSYFT

SEQ ID NO: 11969 - protein, 25 aa, synthetic construct
  REGION 1..25: note = Description of Artificial Sequence: Synthetic peptide
HFFFAQDGNAAISDYDYYRYNLPTM

SEQ ID NO: 11970 - protein, 25 aa, synthetic construct
  REGION 1..25: note = Description of Artificial Sequence: Synthetic peptide
DYQIGGYTEKWESGVKDCVVLHSYF

SEQ ID NO: 11971 - protein, 25 aa, synthetic construct
  REGION 1..25: note = Description of Artificial Sequence: Synthetic peptide
FFFAQDGNAAISDYDYYRYNLPTMC

SEQ ID NO: 11972 - protein, 25 aa, synthetic construct
  REGION 1..25: note = Description of Artificial Sequence: Synthetic peptide
SHFAIGLALYYPSARIVYTACSHAA

SEQ ID NO: 11973 - protein, 25 aa, synthetic construct
  REGION 1..25: note = Description of Artificial Sequence: Synthetic peptide
HFAIGLALYYPSARIVYTACSHAAV

SEQ ID NO: 11974 - protein, 25 aa, synthetic construct
  REGION 1..25: note = Description of Artificial Sequence: Synthetic peptide
SDYDYYRYNLPTMCDIRQLLFVVEV

SEQ ID NO: 11975 - protein, 25 aa, synthetic construct
  REGION 1..25: note = Description of Artificial Sequence: Synthetic peptide
LLNKHIDAYKTFPPTEPKKDKKKKA

SEQ ID NO: 11976 - protein, 25 aa, synthetic construct
  REGION 1..25: note = Description of Artificial Sequence: Synthetic peptide
LNKHIDAYKTFPPTEPKKDKKKKAD

SEQ ID NO: 11977 - protein, 25 aa, synthetic construct
  REGION 1..25: note = Description of Artificial Sequence: Synthetic peptide
ILLNKHIDAYKTFPPTEPKKDKKKK

SEQ ID NO: 11978 - protein, 25 aa, synthetic construct
  REGION 1..25: note = Description of Artificial Sequence: Synthetic peptide
RQGTDYKHWPQIAQFAPSASAFFGM

SEQ ID NO: 11979 - protein, 25 aa, synthetic construct
  REGION 1..25: note = Description of Artificial Sequence: Synthetic peptide
IRQGTDYKHWPQIAQFAPSASAFFG

SEQ ID NO: 11980 - protein, 25 aa, synthetic construct
  REGION 1..25: note = Description of Artificial Sequence: Synthetic peptide
QGTDYKHWPQIAQFAPSASAFFGMS

SEQ ID NO: 11981 - protein, 25 aa, synthetic construct
  REGION 1..25: note = Description of Artificial Sequence: Synthetic peptide
LAATKMSECVLGQSKRVDFCGKGYH

SEQ ID NO: 11982 - protein, 25 aa, synthetic construct
  REGION 1..25: note = Description of Artificial Sequence: Synthetic peptide
APATVCGPKKSTNLVKNKCVNFNFN

SEQ ID NO: 11983 - protein, 25 aa, synthetic construct
  REGION 1..25: note = Description of Artificial Sequence: Synthetic peptide
CGPKKSTNLVKNKCVNFNFNGLTGT

SEQ ID NO: 11984 - protein, 25 aa, synthetic construct
  REGION 1..25: note = Description of Artificial Sequence: Synthetic peptide
VCGPKKSTNLVKNKCVNFNFNGLTG

SEQ ID NO: 11985 - protein, 25 aa, synthetic construct
  REGION 1..25: note = Description of Artificial Sequence: Synthetic peptide
ANLAATKMSECVLGQSKRVDFCGKG

SEQ ID NO: 11986 - protein, 25 aa, synthetic construct
  REGION 1..25: note = Description of Artificial Sequence: Synthetic peptide
SFELLHAPATVCGPKKSTNLVKNKC

SEQ ID NO: 11987 - protein, 25 aa, synthetic construct
  REGION 1..25: note = Description of Artificial Sequence: Synthetic peptide
LLHAPATVCGPKKSTNLVKNKCVNF

SEQ ID NO: 11988 - protein, 25 aa, synthetic construct
  REGION 1..25: note = Description of Artificial Sequence: Synthetic peptide
FELLHAPATVCGPKKSTNLVKNKCV

SEQ ID NO: 11989 - protein, 25 aa, synthetic construct
  REGION 1..25: note = Description of Artificial Sequence: Synthetic peptide
NLAATKMSECVLGQSKRVDFCGKGY

SEQ ID NO: 11990 - protein, 25 aa, synthetic construct
  REGION 1..25: note = Description of Artificial Sequence: Synthetic peptide
TVCGPKKSTNLVKNKCVNFNFNGLT

SEQ ID NO: 11991 - protein, 25 aa, synthetic construct
  REGION 1..25: note = Description of Artificial Sequence: Synthetic peptide
ATVCGPKKSTNLVKNKCVNFNFNGL

SEQ ID NO: 11992 - protein, 25 aa, synthetic construct
  REGION 1..25: note = Description of Artificial Sequence: Synthetic peptide
HAPATVCGPKKSTNLVKNKCVNFNF

SEQ ID NO: 11993 - protein, 25 aa, synthetic construct
  REGION 1..25: note = Description of Artificial Sequence: Synthetic peptide
PATVCGPKKSTNLVKNKCVNFNFNG

SEQ ID NO: 11994 - protein, 25 aa, synthetic construct
  REGION 1..25: note = Description of Artificial Sequence: Synthetic peptide
ELLHAPATVCGPKKSTNLVKNKCVN

SEQ ID NO: 11995 - protein, 25 aa, synthetic construct
  REGION 1..25: note = Description of Artificial Sequence: Synthetic peptide
LHAPATVCGPKKSTNLVKNKCVNFN

SEQ ID NO: 11996 - protein, 25 aa, synthetic construct
  REGION 1..25: note = Description of Artificial Sequence: Synthetic peptide
YYRRATRRIRGGDGKMKDLSPRWYF

SEQ ID NO: 11997 - protein, 25 aa, synthetic construct
  REGION 1..25: note = Description of Artificial Sequence: Synthetic peptide
TRRIRGGDGKMKDLSPRWYFYYLGT

SEQ ID NO: 11998 - protein, 25 aa, synthetic construct
  REGION 1..25: note = Description of Artificial Sequence: Synthetic peptide
YRRATRRIRGGDGKMKDLSPRWYFY

SEQ ID NO: 11999 - protein, 25 aa, synthetic construct
  REGION 1..25: note = Description of Artificial Sequence: Synthetic peptide
ATRRIRGGDGKMKDLSPRWYFYYLG

SEQ ID NO: 12000 - protein, 25 aa, synthetic construct
  REGION 1..25: note = Description of Artificial Sequence: Synthetic peptide
RATRRIRGGDGKMKDLSPRWYFYYL

SEQ ID NO: 12001 - protein, 25 aa, synthetic construct
  REGION 1..25: note = Description of Artificial Sequence: Synthetic peptide
RRATRRIRGGDGKMKDLSPRWYFYY

SEQ ID NO: 12002 - protein, 25 aa, synthetic construct
  REGION 1..25: note = Description of Artificial Sequence: Synthetic peptide
YFTQSRNLQEFKPRSQMEIDFLELA

SEQ ID NO: 12003 - protein, 25 aa, synthetic construct
  REGION 1..25: note = Description of Artificial Sequence: Synthetic peptide
LTNDNTSRYWEPEFYEAMYTPHTVL

SEQ ID NO: 12004 - protein, 25 aa, synthetic construct
  REGION 1..25: note = Description of Artificial Sequence: Synthetic peptide
RVIHFGAGSDKGVAPGTAVLRQWLP

SEQ ID NO: 12005 - protein, 25 aa, synthetic construct
  REGION 1..25: note = Description of Artificial Sequence: Synthetic peptide
FTQSRNLQEFKPRSQMEIDFLELAM

SEQ ID NO: 12006 - protein, 25 aa, synthetic construct
  REGION 1..25: note = Description of Artificial Sequence: Synthetic peptide
KKKADETQALPQRQKKQQTVTLLPA

SEQ ID NO: 12007 - protein, 25 aa, synthetic construct
  REGION 1..25: note = Description of Artificial Sequence: Synthetic peptide
PTEPKKDKKKKADETQALPQRQKKQ

SEQ ID NO: 12008 - protein, 25 aa, synthetic construct
  REGION 1..25: note = Description of Artificial Sequence: Synthetic peptide
KADETQALPQRQKKQQTVTLLPAAD

SEQ ID NO: 12009 - protein, 25 aa, synthetic construct
  REGION 1..25: note = Description of Artificial Sequence: Synthetic peptide
DKKKKADETQALPQRQKKQQTVTLL

SEQ ID NO: 12010 - protein, 25 aa, synthetic construct
  REGION 1..25: note = Description of Artificial Sequence: Synthetic peptide
KKADETQALPQRQKKQQTVTLLPAA

SEQ ID NO: 12011 - protein, 25 aa, synthetic construct
  REGION 1..25: note = Description of Artificial Sequence: Synthetic peptide
EPKKDKKKKADETQALPQRQKKQQT

SEQ ID NO: 12012 - protein, 25 aa, synthetic construct
  REGION 1..25: note = Description of Artificial Sequence: Synthetic peptide
TEPKKDKKKKADETQALPQRQKKQQ

SEQ ID NO: 12013 - protein, 25 aa, synthetic construct
  REGION 1..25: note = Description of Artificial Sequence: Synthetic peptide
KKKKADETQALPQRQKKQQTVTLLP

SEQ ID NO: 12014 - protein, 25 aa, synthetic construct
  REGION 1..25: note = Description of Artificial Sequence: Synthetic peptide
KKDKKKKADETQALPQRQKKQQTVT

SEQ ID NO: 12015 - protein, 25 aa, synthetic construct
  REGION 1..25: note = Description of Artificial Sequence: Synthetic peptide
KDKKKKADETQALPQRQKKQQTVTL

SEQ ID NO: 12016 - protein, 25 aa, synthetic construct
  REGION 1..25: note = Description of Artificial Sequence: Synthetic peptide
PKKDKKKKADETQALPQRQKKQQTV

SEQ ID NO: 12017 - protein, 25 aa, synthetic construct
  REGION 1..25: note = Description of Artificial Sequence: Synthetic peptide
TQSRNLQEFKPRSQMEIDFLELAMD

SEQ ID NO: 12018 - protein, 25 aa, synthetic construct
  REGION 1..25: note = Description of Artificial Sequence: Synthetic peptide
QSRNLQEFKPRSQMEIDFLELAMDE

SEQ ID NO: 12019 - protein, 25 aa, synthetic construct
  REGION 1..25: note = Description of Artificial Sequence: Synthetic peptide
PEFYEAMYTPHTVLQAVGACVLCNS

SEQ ID NO: 12020 - protein, 25 aa, synthetic construct
  REGION 1..25: note = Description of Artificial Sequence: Synthetic peptide
SRNLQEFKPRSQMEIDFLELAMDEF

SEQ ID NO: 12021 - protein, 25 aa, synthetic construct
  REGION 1..25: note = Description of Artificial Sequence: Synthetic peptide
LHLLIGLAKRFKESPFELEDFIPMD

SEQ ID NO: 12022 - protein, 25 aa, synthetic construct
  REGION 1..25: note = Description of Artificial Sequence: Synthetic peptide
SGVKDCVVLHSYFTSDYYQLYSTQL

SEQ ID NO: 12023 - protein, 25 aa, synthetic construct
  REGION 1..25: note = Description of Artificial Sequence: Synthetic peptide
GLHLLIGLAKRFKESPFELEDFIPM

SEQ ID NO: 12024 - protein, 25 aa, synthetic construct
  REGION 1..25: note = Description of Artificial Sequence: Synthetic peptide
FGRRGPEQTQGNFGDQELIRQGTDY

SEQ ID NO: 12025 - protein, 25 aa, synthetic construct
  REGION 1..25: note = Description of Artificial Sequence: Synthetic peptide
RRGPEQTQGNFGDQELIRQGTDYKH

SEQ ID NO: 12026 - protein, 25 aa, synthetic construct
  REGION 1..25: note = Description of Artificial Sequence: Synthetic peptide
GRRGPEQTQGNFGDQELIRQGTDYK

SEQ ID NO: 12027 - protein, 25 aa, synthetic construct
  REGION 1..25: note = Description of Artificial Sequence: Synthetic peptide
TVSCLPFTINCQEPKLGSLVVRCSF

SEQ ID NO: 12028 - protein, 25 aa, synthetic construct
  REGION 1..25: note = Description of Artificial Sequence: Synthetic peptide
NYTVSCLPFTINCQEPKLGSLVVRC

SEQ ID NO: 12029 - protein, 25 aa, synthetic construct
  REGION 1..25: note = Description of Artificial Sequence: Synthetic peptide
GNYTVSCLPFTINCQEPKLGSLVVR

SEQ ID NO: 12030 - protein, 25 aa, synthetic construct
  REGION 1..25: note = Description of Artificial Sequence: Synthetic peptide
VSCLPFTINCQEPKLGSLVVRCSFY

SEQ ID NO: 12031 - protein, 25 aa, synthetic construct
  REGION 1..25: note = Description of Artificial Sequence: Synthetic peptide
YTVSCLPFTINCQEPKLGSLVVRCS

SEQ ID NO: 12032 - protein, 25 aa, synthetic construct
  REGION 1..25: note = Description of Artificial Sequence: Synthetic peptide
GTSPARMAGNGGDAALALLLLDRLN

SEQ ID NO: 12033 - protein, 25 aa, synthetic construct
  REGION 1..25: note = Description of Artificial Sequence: Synthetic peptide
TSPARMAGNGGDAALALLLLDRLNQ

SEQ ID NO: 12034 - protein, 25 aa, synthetic construct
  REGION 1..25: note = Description of Artificial Sequence: Synthetic peptide
PLSAPTLVPQEHYVRITGLYPTLNI

SEQ ID NO: 12035 - protein, 25 aa, synthetic construct
  REGION 1..25: note = Description of Artificial Sequence: Synthetic peptide
SPARMAGNGGDAALALLLLDRLNQL

SEQ ID NO: 12036 - protein, 25 aa, synthetic construct
  REGION 1..25: note = Description of Artificial Sequence: Synthetic peptide
FYYLGTGPEAGLPYGANKDGIIWVA

SEQ ID NO: 12037 - protein, 25 aa, synthetic construct
  REGION 1..25: note = Description of Artificial Sequence: Synthetic peptide
YFYYLGTGPEAGLPYGANKDGIIWV

SEQ ID NO: 12038 - protein, 25 aa, synthetic construct
  REGION 1..25: note = Description of Artificial Sequence: Synthetic peptide
ELKHFFFAQDGNAAISDYDYYRYNL

SEQ ID NO: 12039 - protein, 25 aa, synthetic construct
  REGION 1..25: note = Description of Artificial Sequence: Synthetic peptide
LKHFFFAQDGNAAISDYDYYRYNLP

SEQ ID NO: 12040 - protein, 25 aa, synthetic construct
  REGION 1..25: note = Description of Artificial Sequence: Synthetic peptide
SVMLTNDNTSRYWEPEFYEAMYTPH

SEQ ID NO: 12041 - protein, 25 aa, synthetic construct
  REGION 1..25: note = Description of Artificial Sequence: Synthetic peptide
KEGQINDMILSLLSKGRLIIRENNR

SEQ ID NO: 12042 - protein, 25 aa, synthetic construct
  REGION 1..25: note = Description of Artificial Sequence: Synthetic peptide
EGQINDMILSLLSKGRLIIRENNRV

SEQ ID NO: 12043 - protein, 25 aa, synthetic construct
  REGION 1..25: note = Description of Artificial Sequence: Synthetic peptide
LKEGQINDMILSLLSKGRLIIRENN

SEQ ID NO: 12044 - protein, 25 aa, synthetic construct
  REGION 1..25: note = Description of Artificial Sequence: Synthetic peptide
KNHTSPDVDLGDISGINASVVNIQK

SEQ ID NO: 12045 - protein, 25 aa, synthetic construct
  REGION 1..25: note = Description of Artificial Sequence: Synthetic peptide
IVQMLSDTLKNLSDRVVFVLWAHGF

SEQ ID NO: 12046 - protein, 25 aa, synthetic construct
  REGION 1..25: note = Description of Artificial Sequence: Synthetic peptide
KIVQMLSDTLKNLSDRVVFVLWAHG

SEQ ID NO: 12047 - protein, 25 aa, synthetic construct
  REGION 1..25: note = Description of Artificial Sequence: Synthetic peptide
PHEFCSQHTMLVKQGDDYVYLPYPD

SEQ ID NO: 12048 - protein, 25 aa, synthetic construct
  REGION 1..25: note = Description of Artificial Sequence: Synthetic peptide
HEFCSQHTMLVKQGDDYVYLPYPDP

SEQ ID NO: 12049 - protein, 25 aa, synthetic construct
  REGION 1..25: note = Description of Artificial Sequence: Synthetic peptide
TGPEAGLPYGANKDGIIWVATEGAL

SEQ ID NO: 12050 - protein, 25 aa, synthetic construct
  REGION 1..25: note = Description of Artificial Sequence: Synthetic peptide
GYTEKWESGVKDCVVLHSYFTSDYY

SEQ ID NO: 12051 - protein, 25 aa, synthetic construct
  REGION 1..25: note = Description of Artificial Sequence: Synthetic peptide
SYSLFDMSKFPLKLRGTAVMSLKEG

SEQ ID NO: 12052 - protein, 25 aa, synthetic construct
  REGION 1..25: note = Description of Artificial Sequence: Synthetic peptide
IGGYTEKWESGVKDCVVLHSYFTSD

SEQ ID NO: 12053 - protein, 25 aa, synthetic construct
  REGION 1..25: note = Description of Artificial Sequence: Synthetic peptide
YSLFDMSKFPLKLRGTAVMSLKEGQ

SEQ ID NO: 12054 - protein, 25 aa, synthetic construct
  REGION 1..25: note = Description of Artificial Sequence: Synthetic peptide
QIGGYTEKWESGVKDCVVLHSYFTS

SEQ ID NO: 12055 - protein, 25 aa, synthetic construct
  REGION 1..25: note = Description of Artificial Sequence: Synthetic peptide
GGYTEKWESGVKDCVVLHSYFTSDY

SEQ ID NO: 12056 - protein, 25 aa, synthetic construct
  REGION 1..25: note = Description of Artificial Sequence: Synthetic peptide
DGIIWVATEGALNTPKDHIGTRNPA

SEQ ID NO: 12057 - protein, 25 aa, synthetic construct
  REGION 1..25: note = Description of Artificial Sequence: Synthetic peptide
IIWVATEGALNTPKDHIGTRNPANN

SEQ ID NO: 12058 - protein, 25 aa, synthetic construct
  REGION 1..25: note = Description of Artificial Sequence: Synthetic peptide
GIIWVATEGALNTPKDHIGTRNPAN

SEQ ID NO: 12059 - protein, 25 aa, synthetic construct
  REGION 1..25: note = Description of Artificial Sequence: Synthetic peptide
HSQLGGLHLLIGLAKRFKESPFELE

SEQ ID NO: 12060 - protein, 25 aa, synthetic construct
  REGION 1..25: note = Description of Artificial Sequence: Synthetic peptide
DFSHSQLGGLHLLIGLAKRFKESPF

SEQ ID NO: 12061 - protein, 25 aa, synthetic construct
  REGION 1..25: note = Description of Artificial Sequence: Synthetic peptide
FSHSQLGGLHLLIGLAKRFKESPFE

SEQ ID NO: 12062 - protein, 25 aa, synthetic construct
  REGION 1..25: note = Description of Artificial Sequence: Synthetic peptide
GDFSHSQLGGLHLLIGLAKRFKESP

SEQ ID NO: 12063 - protein, 25 aa, synthetic construct
  REGION 1..25: note = Description of Artificial Sequence: Synthetic peptide
SHSQLGGLHLLIGLAKRFKESPFEL

SEQ ID NO: 12064 - protein, 25 aa, synthetic construct
  REGION 1..25: note = Description of Artificial Sequence: Synthetic peptide
YGDFSHSQLGGLHLLIGLAKRFKES

SEQ ID NO: 12065 - protein, 25 aa, synthetic construct
  REGION 1..25: note = Description of Artificial Sequence: Synthetic peptide
TDNTFVSGNCDVVIGIVNNTVYDPL

SEQ ID NO: 12066 - protein, 25 aa, synthetic construct
  REGION 1..25: note = Description of Artificial Sequence: Synthetic peptide
TTDNTFVSGNCDVVIGIVNNTVYDP

SEQ ID NO: 12067 - protein, 25 aa, synthetic construct
  REGION 1..25: note = Description of Artificial Sequence: Synthetic peptide
ITTDNTFVSGNCDVVIGIVNNTVYD

SEQ ID NO: 12068 - protein, 25 aa, synthetic construct
  REGION 1..25: note = Description of Artificial Sequence: Synthetic peptide
DNTFVSGNCDVVIGIVNNTVYDPLQ

SEQ ID NO: 12069 - protein, 25 aa, synthetic construct
  REGION 1..25: note = Description of Artificial Sequence: Synthetic peptide
DAVVYRGTTTYKLNVGDYFVLTSHT

SEQ ID NO: 12070 - protein, 25 aa, synthetic construct
  REGION 1..25: note = Description of Artificial Sequence: Synthetic peptide
AVVYRGTTTYKLNVGDYFVLTSHTV

SEQ ID NO: 12071 - protein, 25 aa, synthetic construct
  REGION 1..25: note = Description of Artificial Sequence: Synthetic peptide
DLKFPRGQGVPINTNSSPDDQIGYY

SEQ ID NO: 12072 - protein, 25 aa, synthetic construct
  REGION 1..25: note = Description of Artificial Sequence: Synthetic peptide
KFPRGQGVPINTNSSPDDQIGYYRR

SEQ ID NO: 12073 - protein, 25 aa, synthetic construct
  REGION 1..25: note = Description of Artificial Sequence: Synthetic peptide
EDLKFPRGQGVPINTNSSPDDQIGY

SEQ ID NO: 12074 - protein, 25 aa, synthetic construct
  REGION 1..25: note = Description of Artificial Sequence: Synthetic peptide
LKFPRGQGVPINTNSSPDDQIGYYR

SEQ ID NO: 12075 - protein, 25 aa, synthetic construct
  REGION 1..25: note = Description of Artificial Sequence: Synthetic peptide
FPRGQGVPINTNSSPDDQIGYYRRA

SEQ ID NO: 12076 - protein, 25 aa, synthetic construct
  REGION 1..25: note = Description of Artificial Sequence: Synthetic peptide
PRGQGVPINTNSSPDDQIGYYRRAT

SEQ ID NO: 12077 - protein, 25 aa, synthetic construct
  REGION 1..25: note = Description of Artificial Sequence: Synthetic peptide
GDAVVYRGTTTYKLNVGDYFVLTSH

SEQ ID NO: 12078 - protein, 25 aa, synthetic construct
  REGION 1..25: note = Description of Artificial Sequence: Synthetic peptide
RTCCLCDRRATCFSTASDTYACWHH

SEQ ID NO: 12079 - protein, 25 aa, synthetic construct
  REGION 1..25: note = Description of Artificial Sequence: Synthetic peptide
CDRRATCFSTASDTYACWHHSIGFD

SEQ ID NO: 12080 - protein, 25 aa, synthetic construct
  REGION 1..25: note = Description of Artificial Sequence: Synthetic peptide
LCDRRATCFSTASDTYACWHHSIGF

SEQ ID NO: 12081 - protein, 25 aa, synthetic construct
  REGION 1..25: note = Description of Artificial Sequence: Synthetic peptide
CLCDRRATCFSTASDTYACWHHSIG

SEQ ID NO: 12082 - protein, 25 aa, synthetic construct
  REGION 1..25: note = Description of Artificial Sequence: Synthetic peptide
CCLCDRRATCFSTASDTYACWHHSI

SEQ ID NO: 12083 - protein, 25 aa, synthetic construct
  REGION 1..25: note = Description of Artificial Sequence: Synthetic peptide
TCCLCDRRATCFSTASDTYACWHHS

SEQ ID NO: 12084 - protein, 25 aa, synthetic construct
  REGION 1..25: note = Description of Artificial Sequence: Synthetic peptide
QVILLNKHIDAYKTFPPTEPKKDKK

SEQ ID NO: 12085 - protein, 25 aa, synthetic construct
  REGION 1..25: note = Description of Artificial Sequence: Synthetic peptide
VILLNKHIDAYKTFPPTEPKKDKKK

SEQ ID NO: 12086 - protein, 25 aa, synthetic construct
  REGION 1..25: note = Description of Artificial Sequence: Synthetic peptide
LPKGFYAEGSRGGSQASSRSSSRSR

SEQ ID NO: 12087 - protein, 25 aa, synthetic construct
  REGION 1..25: note = Description of Artificial Sequence: Synthetic peptide
TLPKGFYAEGSRGGSQASSRSSSRS

SEQ ID NO: 12088 - protein, 25 aa, synthetic construct
  REGION 1..25: note = Description of Artificial Sequence: Synthetic peptide
TKVDGVDVELFENKTTLPVNVAFEL

SEQ ID NO: 12089 - protein, 25 aa, synthetic construct
  REGION 1..25: note = Description of Artificial Sequence: Synthetic peptide
YTKVDGVDVELFENKTTLPVNVAFE

SEQ ID NO: 12090 - protein, 25 aa, synthetic construct
  REGION 1..25: note = Description of Artificial Sequence: Synthetic peptide
QILPDPSKPSKRSFIEDLLFNKVTL

SEQ ID NO: 12091 - protein, 25 aa, synthetic construct
  REGION 1..25: note = Description of Artificial Sequence: Synthetic peptide
ILPDPSKPSKRSFIEDLLFNKVTLA

SEQ ID NO: 12092 - protein, 25 aa, synthetic construct
  REGION 1..25: note = Description of Artificial Sequence: Synthetic peptide
QSKRVDFCGKGYHLMSFPQSAPHGV

SEQ ID NO: 12093 - protein, 25 aa, synthetic construct
  REGION 1..25: note = Description of Artificial Sequence: Synthetic peptide
LGQSKRVDFCGKGYHLMSFPQSAPH

SEQ ID NO: 12094 - protein, 25 aa, synthetic construct
  REGION 1..25: note = Description of Artificial Sequence: Synthetic peptide
GQSKRVDFCGKGYHLMSFPQSAPHG

SEQ ID NO: 12095 - protein, 25 aa, synthetic construct
  REGION 1..25: note = Description of Artificial Sequence: Synthetic peptide
LIIKNLSKSLTENKYSQLDEEQPME

SEQ ID NO: 12096 - protein, 25 aa, synthetic construct
  REGION 1..25: note = Description of Artificial Sequence: Synthetic peptide
IIKNLSKSLTENKYSQLDEEQPMEI

SEQ ID NO: 12097 - protein, 25 aa, synthetic construct
  REGION 1..25: note = Description of Artificial Sequence: Synthetic peptide
GVDVELFENKTTLPVNVAFELWAKR

SEQ ID NO: 12098 - protein, 25 aa, synthetic construct
  REGION 1..25: note = Description of Artificial Sequence: Synthetic peptide
VDVELFENKTTLPVNVAFELWAKRN

SEQ ID NO: 12099 - protein, 25 aa, synthetic construct
  REGION 1..25: note = Description of Artificial Sequence: Synthetic peptide
DVELFENKTTLPVNVAFELWAKRNI

SEQ ID NO: 12100 - protein, 25 aa, synthetic construct
  REGION 1..25: note = Description of Artificial Sequence: Synthetic peptide
ELFENKTTLPVNVAFELWAKRNIKP

SEQ ID NO: 12101 - protein, 25 aa, synthetic construct
  REGION 1..25: note = Description of Artificial Sequence: Synthetic peptide
LFENKTTLPVNVAFELWAKRNIKPV

SEQ ID NO: 12102 - protein, 25 aa, synthetic construct
  REGION 1..25: note = Description of Artificial Sequence: Synthetic peptide
VELFENKTTLPVNVAFELWAKRNIK

SEQ ID NO: 12103 - protein, 25 aa, synthetic construct
  REGION 1..25: note = Description of Artificial Sequence: Synthetic peptide
VAAGLEAPFLYLYALVYFLQSINFV

SEQ ID NO: 12104 - protein, 25 aa, synthetic construct
  REGION 1..25: note = Description of Artificial Sequence: Synthetic peptide
LVAAGLEAPFLYLYALVYFLQSINF

SEQ ID NO: 12105 - protein, 25 aa, synthetic construct
  REGION 1..25: note = Description of Artificial Sequence: Synthetic peptide
IVLQLPQGTTLPKGFYAEGSRGGSQ

SEQ ID NO: 12106 - protein, 25 aa, synthetic construct
  REGION 1..25: note = Description of Artificial Sequence: Synthetic peptide
AIVLQLPQGTTLPKGFYAEGSRGGS

SEQ ID NO: 12107 - protein, 25 aa, synthetic construct
  REGION 1..25: note = Description of Artificial Sequence: Synthetic peptide
VLQLPQGTTLPKGFYAEGSRGGSQA

SEQ ID NO: 12108 - protein, 25 aa, synthetic construct
  REGION 1..25: note = Description of Artificial Sequence: Synthetic peptide
LQLPQGTTLPKGFYAEGSRGGSQAS

SEQ ID NO: 12109 - protein, 25 aa, synthetic construct
  REGION 1..25: note = Description of Artificial Sequence: Synthetic peptide
AATKMSECVLGQSKRVDFCGKGYHL

SEQ ID NO: 12110 - protein, 25 aa, synthetic construct
  REGION 1..25: note = Description of Artificial Sequence: Synthetic peptide
GGNYNYLYRLFRKSNLKPFERDIST

SEQ ID NO: 12111 - protein, 25 aa, synthetic construct
  REGION 1..25: note = Description of Artificial Sequence: Synthetic peptide
RVYSTGSNVFQTRAGCLIGAEHVNN

SEQ ID NO: 12112 - protein, 25 aa, synthetic construct
  REGION 1..25: note = Description of Artificial Sequence: Synthetic peptide
WRVYSTGSNVFQTRAGCLIGAEHVN

SEQ ID NO: 12113 - protein, 25 aa, synthetic construct
  REGION 1..25: note = Description of Artificial Sequence: Synthetic peptide
VYSTGSNVFQTRAGCLIGAEHVNNS

SEQ ID NO: 12114 - protein, 25 aa, synthetic construct
  REGION 1..25: note = Description of Artificial Sequence: Synthetic peptide
YSTGSNVFQTRAGCLIGAEHVNNSY

SEQ ID NO: 12115 - protein, 25 aa, synthetic construct
  REGION 1..25: note = Description of Artificial Sequence: Synthetic peptide
STGSNVFQTRAGCLIGAEHVNNSYE

SEQ ID NO: 12116 - protein, 25 aa, synthetic construct
  REGION 1..25: note = Description of Artificial Sequence: Synthetic peptide
TWRVYSTGSNVFQTRAGCLIGAEHV

SEQ ID NO: 12117 - protein, 25 aa, synthetic construct
  REGION 1..25: note = Description of Artificial Sequence: Synthetic peptide
SANLAATKMSECVLGQSKRVDFCGK

SEQ ID NO: 12118 - protein, 25 aa, synthetic construct
  REGION 1..25: note = Description of Artificial Sequence: Synthetic peptide
ASANLAATKMSECVLGQSKRVDFCG

SEQ ID NO: 12119 - protein, 25 aa, synthetic construct
  REGION 1..25: note = Description of Artificial Sequence: Synthetic peptide
RASANLAATKMSECVLGQSKRVDFC

SEQ ID NO: 12120 - protein, 25 aa, synthetic construct
  REGION 1..25: note = Description of Artificial Sequence: Synthetic peptide
HPTQAPTHLSVDTKFKTEGLCVDIP

SEQ ID NO: 12121 - protein, 25 aa, synthetic construct
  REGION 1..25: note = Description of Artificial Sequence: Synthetic peptide
LHPTQAPTHLSVDTKFKTEGLCVDI

SEQ ID NO: 12122 - protein, 25 aa, synthetic construct
  REGION 1..25: note = Description of Artificial Sequence: Synthetic peptide
TQAPTHLSVDTKFKTEGLCVDIPGI

SEQ ID NO: 12123 - protein, 25 aa, synthetic construct
  REGION 1..25: note = Description of Artificial Sequence: Synthetic peptide
PTQAPTHLSVDTKFKTEGLCVDIPG

SEQ ID NO: 12124 - protein, 25 aa, synthetic construct
  REGION 1..25: note = Description of Artificial Sequence: Synthetic peptide
TGLHPTQAPTHLSVDTKFKTEGLCV

SEQ ID NO: 12125 - protein, 25 aa, synthetic construct
  REGION 1..25: note = Description of Artificial Sequence: Synthetic peptide
GLHPTQAPTHLSVDTKFKTEGLCVD

SEQ ID NO: 12126 - protein, 25 aa, synthetic construct
  REGION 1..25: note = Description of Artificial Sequence: Synthetic peptide
SIVCRFDTRVLSNLNLPGCDGGSLY

SEQ ID NO: 12127 - protein, 25 aa, synthetic construct
  REGION 1..25: note = Description of Artificial Sequence: Synthetic peptide
TLMIERFVSLAIDAYPLTKHPNQEY

SEQ ID NO: 12128 - protein, 25 aa, synthetic construct
  REGION 1..25: note = Description of Artificial Sequence: Synthetic peptide
AAEASKKPRQKRTATKAYNVTQAFG

SEQ ID NO: 12129 - protein, 25 aa, synthetic construct
  REGION 1..25: note = Description of Artificial Sequence: Synthetic peptide
ANSIVCRFDTRVLSNLNLPGCDGGS

SEQ ID NO: 12130 - protein, 25 aa, synthetic construct
  REGION 1..25: note = Description of Artificial Sequence: Synthetic peptide
NSIVCRFDTRVLSNLNLPGCDGGSL

SEQ ID NO: 12131 - protein, 25 aa, synthetic construct
  REGION 1..25: note = Description of Artificial Sequence: Synthetic peptide
LMIERFVSLAIDAYPLTKHPNQEYA

SEQ ID NO: 12132 - protein, 25 aa, synthetic construct
  REGION 1..25: note = Description of Artificial Sequence: Synthetic peptide
QHRLYECLYRNRDVDTDFVNEFYAY

SEQ ID NO: 12133 - protein, 25 aa, synthetic construct
  REGION 1..25: note = Description of Artificial Sequence: Synthetic peptide
LYECLYRNRDVDTDFVNEFYAYLRK

SEQ ID NO: 12134 - protein, 25 aa, synthetic construct
  REGION 1..25: note = Description of Artificial Sequence: Synthetic peptide
VCRLMKTIGPDMFLGTCRRCPAEIV

SEQ ID NO: 12135 - protein, 25 aa, synthetic construct
  REGION 1..25: note = Description of Artificial Sequence: Synthetic peptide
RLYECLYRNRDVDTDFVNEFYAYLR

SEQ ID NO: 12136 - protein, 25 aa, synthetic construct
  REGION 1..25: note = Description of Artificial Sequence: Synthetic peptide
HRLYECLYRNRDVDTDFVNEFYAYL

SEQ ID NO: 12137 - protein, 25 aa, synthetic construct
  REGION 1..25: note = Description of Artificial Sequence: Synthetic peptide
PQIITTDNTFVSGNCDVVIGIVNNT

SEQ ID NO: 12138 - protein, 25 aa, synthetic construct
  REGION 1..25: note = Description of Artificial Sequence: Synthetic peptide
MPNLYKMQRMLLEKCDLQNYGDSAT

SEQ ID NO: 12139 - protein, 25 aa, synthetic construct
  REGION 1..25: note = Description of Artificial Sequence: Synthetic peptide
FIKGLNNLNRGMVLGSLAATVRLQA

SEQ ID NO: 12140 - protein, 25 aa, synthetic construct
  REGION 1..25: note = Description of Artificial Sequence: Synthetic peptide
SDLATNNLVVMAYITGGVVQLTSQW

SEQ ID NO: 12141 - protein, 25 aa, synthetic construct
  REGION 1..25: note = Description of Artificial Sequence: Synthetic peptide
YFIKGLNNLNRGMVLGSLAATVRLQ

SEQ ID NO: 12142 - protein, 25 aa, synthetic construct
  REGION 1..25: note = Description of Artificial Sequence: Synthetic peptide
IDKCSRIIPARARVECFDKFKVNST

SEQ ID NO: 12143 - protein, 25 aa, synthetic construct
  REGION 1..25: note = Description of Artificial Sequence: Synthetic peptide
RFYRLANECAQVLSEMVMCGGSLYV

SEQ ID NO: 12144 - protein, 25 aa, synthetic construct
  REGION 1..25: note = Description of Artificial Sequence: Synthetic peptide
FYRLANECAQVLSEMVMCGGSLYVK

SEQ ID NO: 12145 - protein, 25 aa, synthetic construct
  REGION 1..25: note = Description of Artificial Sequence: Synthetic peptide
NSYECDIPIGAGICASYQTQTNSPR

SEQ ID NO: 12146 - protein, 25 aa, synthetic construct
  REGION 1..25: note = Description of Artificial Sequence: Synthetic peptide
QIHTIDGSSGVVNPVMEPIYDEPTT

SEQ ID NO: 12147 - protein, 25 aa, synthetic construct
  REGION 1..25: note = Description of Artificial Sequence: Synthetic peptide
HVQIHTIDGSSGVVNPVMEPIYDEP

SEQ ID NO: 12148 - protein, 25 aa, synthetic construct
  REGION 1..25: note = Description of Artificial Sequence: Synthetic peptide
EHVQIHTIDGSSGVVNPVMEPIYDE

SEQ ID NO: 12149 - protein, 25 aa, synthetic construct
  REGION 1..25: note = Description of Artificial Sequence: Synthetic peptide
HTIDGSSGVVNPVMEPIYDEPTTTT

SEQ ID NO: 12150 - protein, 25 aa, synthetic construct
  REGION 1..25: note = Description of Artificial Sequence: Synthetic peptide
EEHVQIHTIDGSSGVVNPVMEPIYD

SEQ ID NO: 12151 - protein, 25 aa, synthetic construct
  REGION 1..25: note = Description of Artificial Sequence: Synthetic peptide
IHTIDGSSGVVNPVMEPIYDEPTTT

SEQ ID NO: 12152 - protein, 25 aa, synthetic construct
  REGION 1..25: note = Description of Artificial Sequence: Synthetic peptide
VQIHTIDGSSGVVNPVMEPIYDEPT

SEQ ID NO: 12153 - protein, 25 aa, synthetic construct
  REGION 1..25: note = Description of Artificial Sequence: Synthetic peptide
PDDQIGYYRRATRRIRGGDGKMKDL

SEQ ID NO: 12154 - protein, 25 aa, synthetic construct
  REGION 1..25: note = Description of Artificial Sequence: Synthetic peptide
SPDDQIGYYRRATRRIRGGDGKMKD

SEQ ID NO: 12155 - protein, 25 aa, synthetic construct
  REGION 1..25: note = Description of Artificial Sequence: Synthetic peptide
PINTNSSPDDQIGYYRRATRRIRGG

SEQ ID NO: 12156 - protein, 25 aa, synthetic construct
  REGION 1..25: note = Description of Artificial Sequence: Synthetic peptide
INTNSSPDDQIGYYRRATRRIRGGD

SEQ ID NO: 12157 - protein, 25 aa, synthetic construct
  REGION 1..25: note = Description of Artificial Sequence: Synthetic peptide
TNILLNVPLHGTILTRPLLESELVI

SEQ ID NO: 12158 - protein, 25 aa, synthetic construct
  REGION 1..25: note = Description of Artificial Sequence: Synthetic peptide
PETNILLNVPLHGTILTRPLLESEL

SEQ ID NO: 12159 - protein, 25 aa, synthetic construct
  REGION 1..25: note = Description of Artificial Sequence: Synthetic peptide
ETNILLNVPLHGTILTRPLLESELV

SEQ ID NO: 12160 - protein, 25 aa, synthetic construct
  REGION 1..25: note = Description of Artificial Sequence: Synthetic peptide
PLEFGATSAALQPEEEQEEDWLDDD

SEQ ID NO: 12161 - protein, 25 aa, synthetic construct
  REGION 1..25: note = Description of Artificial Sequence: Synthetic peptide
LEFGATSAALQPEEEQEEDWLDDDS

SEQ ID NO: 12162 - protein, 25 aa, synthetic construct
  REGION 1..25: note = Description of Artificial Sequence: Synthetic peptide
EFGATSAALQPEEEQEEDWLDDDSQ

SEQ ID NO: 12163 - protein, 25 aa, synthetic construct
  REGION 1..25: note = Description of Artificial Sequence: Synthetic peptide
IQTIVEVQPQLEMELTPVVQTIEVN

SEQ ID NO: 12164 - protein, 25 aa, synthetic construct
  REGION 1..25: note = Description of Artificial Sequence: Synthetic peptide
FGLYKNTCVGSDNVTDFNAIATCDW

SEQ ID NO: 12165 - protein, 25 aa, synthetic construct
  REGION 1..25: note = Description of Artificial Sequence: Synthetic peptide
TIQTIVEVQPQLEMELTPVVQTIEV

SEQ ID NO: 12166 - protein, 25 aa, synthetic construct
  REGION 1..25: note = Description of Artificial Sequence: Synthetic peptide
TTIQTIVEVQPQLEMELTPVVQTIE

SEQ ID NO: 12167 - protein, 25 aa, synthetic construct
  REGION 1..25: note = Description of Artificial Sequence: Synthetic peptide
FGATSAALQPEEEQEEDWLDDDSQQ

SEQ ID NO: 12168 - protein, 25 aa, synthetic construct
  REGION 1..25: note = Description of Artificial Sequence: Synthetic peptide
FVNEFYAYLRKHFSMMILSDDAVVC

SEQ ID NO: 12169 - protein, 25 aa, synthetic construct
  REGION 1..25: note = Description of Artificial Sequence: Synthetic peptide
VNEFYAYLRKHFSMMILSDDAVVCF

SEQ ID NO: 12170 - protein, 25 aa, synthetic construct
  REGION 1..25: note = Description of Artificial Sequence: Synthetic peptide
ATRGATVVIGTSKFYGGWHNMLKTV

SEQ ID NO: 12171 - protein, 25 aa, synthetic construct
  REGION 1..25: note = Description of Artificial Sequence: Synthetic peptide
AATRGATVVIGTSKFYGGWHNMLKT

SEQ ID NO: 12172 - protein, 25 aa, synthetic construct
  REGION 1..25: note = Description of Artificial Sequence: Synthetic peptide
TRGATVVIGTSKFYGGWHNMLKTVY

SEQ ID NO: 12173 - protein, 25 aa, synthetic construct
  REGION 1..25: note = Description of Artificial Sequence: Synthetic peptide
KVVKVTIDYTEISFMLWCKDGHVET

SEQ ID NO: 12174 - protein, 25 aa, synthetic construct
  REGION 1..25: note = Description of Artificial Sequence: Synthetic peptide
NLLLDKRTTCFSVAALTNNVAFQTV

SEQ ID NO: 12175 - protein, 25 aa, synthetic construct
  REGION 1..25: note = Description of Artificial Sequence: Synthetic peptide
SGNLLLDKRTTCFSVAALTNNVAFQ

SEQ ID NO: 12176 - protein, 25 aa, synthetic construct
  REGION 1..25: note = Description of Artificial Sequence: Synthetic peptide
GNLLLDKRTTCFSVAALTNNVAFQT

SEQ ID NO: 12177 - protein, 25 aa, synthetic construct
  REGION 1..25: note = Description of Artificial Sequence: Synthetic peptide
ATVVIGTSKFYGGWHNMLKTVYSDV

SEQ ID NO: 12178 - protein, 25 aa, synthetic construct
  REGION 1..25: note = Description of Artificial Sequence: Synthetic peptide
QINDMILSLLSKGRLIIRENNRVVI

SEQ ID NO: 12179 - protein, 25 aa, synthetic construct
  REGION 1..25: note = Description of Artificial Sequence: Synthetic peptide
AQDGNAAISDYDYYRYNLPTMCDIR

SEQ ID NO: 12180 - protein, 25 aa, synthetic construct
  REGION 1..25: note = Description of Artificial Sequence: Synthetic peptide
QDGNAAISDYDYYRYNLPTMCDIRQ

SEQ ID NO: 12181 - protein, 25 aa, synthetic construct
  REGION 1..25: note = Description of Artificial Sequence: Synthetic peptide
FAQDGNAAISDYDYYRYNLPTMCDI

SEQ ID NO: 12182 - protein, 25 aa, synthetic construct
  REGION 1..25: note = Description of Artificial Sequence: Synthetic peptide
VLSNLNLPGCDGGSLYVNKHAFHTP

SEQ ID NO: 12183 - protein, 25 aa, synthetic construct
  REGION 1..25: note = Description of Artificial Sequence: Synthetic peptide
RVLSNLNLPGCDGGSLYVNKHAFHT

SEQ ID NO: 12184 - protein, 25 aa, synthetic construct
  REGION 1..25: note = Description of Artificial Sequence: Synthetic peptide
TRVLSNLNLPGCDGGSLYVNKHAFH

SEQ ID NO: 12185 - protein, 25 aa, synthetic construct
  REGION 1..25: note = Description of Artificial Sequence: Synthetic peptide
EFYAYLRKHFSMMILSDDAVVCFNS

SEQ ID NO: 12186 - protein, 25 aa, synthetic construct
  REGION 1..25: note = Description of Artificial Sequence: Synthetic peptide
RNRATRVECTTIVNGVRRSFYVYAN

SEQ ID NO: 12187 - protein, 25 aa, synthetic construct
  REGION 1..25: note = Description of Artificial Sequence: Synthetic peptide
YKRNRATRVECTTIVNGVRRSFYVY

SEQ ID NO: 12188 - protein, 25 aa, synthetic construct
  REGION 1..25: note = Description of Artificial Sequence: Synthetic peptide
ADETQALPQRQKKQQTVTLLPAADL

SEQ ID NO: 12189 - protein, 25 aa, synthetic construct
  REGION 1..25: note = Description of Artificial Sequence: Synthetic peptide
KRNRATRVECTTIVNGVRRSFYVYA

SEQ ID NO: 12190 - protein, 25 aa, synthetic construct
  REGION 1..25: note = Description of Artificial Sequence: Synthetic peptide
VNVAFELWAKRNIKPVPEVKILNNL

SEQ ID NO: 12191 - protein, 25 aa, synthetic construct
  REGION 1..25: note = Description of Artificial Sequence: Synthetic peptide
CEEEEFEPSTQYEYGTEDDYQGKPL

SEQ ID NO: 12192 - protein, 25 aa, synthetic construct
  REGION 1..25: note = Description of Artificial Sequence: Synthetic peptide
NINLHTQVVDMSMTYGQQFGPTYLD

SEQ ID NO: 12193 - protein, 25 aa, synthetic construct
  REGION 1..25: note = Description of Artificial Sequence: Synthetic peptide
FGWLIVGVALLAVFQSASKIITLKK

SEQ ID NO: 12194 - protein, 25 aa, synthetic construct
  REGION 1..25: note = Description of Artificial Sequence: Synthetic peptide
GWLIVGVALLAVFQSASKIITLKKR

SEQ ID NO: 12195 - protein, 25 aa, synthetic construct
  REGION 1..25: note = Description of Artificial Sequence: Synthetic peptide
LNTLTLAVPYNMRVIHFGAGSDKGV

SEQ ID NO: 12196 - protein, 25 aa, synthetic construct
  REGION 1..25: note = Description of Artificial Sequence: Synthetic peptide
NTLTLAVPYNMRVIHFGAGSDKGVA

SEQ ID NO: 12197 - protein, 25 aa, synthetic construct
  REGION 1..25: note = Description of Artificial Sequence: Synthetic peptide
TLTLAVPYNMRVIHFGAGSDKGVAP

SEQ ID NO: 12198 - protein, 25 aa, synthetic construct
  REGION 1..25: note = Description of Artificial Sequence: Synthetic peptide
TLAVPYNMRVIHFGAGSDKGVAPGT

SEQ ID NO: 12199 - protein, 25 aa, synthetic construct
  REGION 1..25: note = Description of Artificial Sequence: Synthetic peptide
QYLNTLTLAVPYNMRVIHFGAGSDK

SEQ ID NO: 12200 - protein, 25 aa, synthetic construct
  REGION 1..25: note = Description of Artificial Sequence: Synthetic peptide
YLNTLTLAVPYNMRVIHFGAGSDKG

SEQ ID NO: 12201 - protein, 25 aa, synthetic construct
  REGION 1..25: note = Description of Artificial Sequence: Synthetic peptide
LTLAVPYNMRVIHFGAGSDKGVAPG

SEQ ID NO: 12202 - protein, 25 aa, synthetic construct
  REGION 1..25: note = Description of Artificial Sequence: Synthetic peptide
GSDKGVAPGTAVLRQWLPTGTLLVD

SEQ ID NO: 12203 - protein, 25 aa, synthetic construct
  REGION 1..25: note = Description of Artificial Sequence: Synthetic peptide
DKGVAPGTAVLRQWLPTGTLLVDSD

SEQ ID NO: 12204 - protein, 25 aa, synthetic construct
  REGION 1..25: note = Description of Artificial Sequence: Synthetic peptide
SDKGVAPGTAVLRQWLPTGTLLVDS

SEQ ID NO: 12205 - protein, 25 aa, synthetic construct
  REGION 1..25: note = Description of Artificial Sequence: Synthetic peptide
KGVAPGTAVLRQWLPTGTLLVDSDL

SEQ ID NO: 12206 - protein, 25 aa, synthetic construct
  REGION 1..25: note = Description of Artificial Sequence: Synthetic peptide
LSFELLHAPATVCGPKKSTNLVKNK

SEQ ID NO: 12207 - protein, 25 aa, synthetic construct
  REGION 1..25: note = Description of Artificial Sequence: Synthetic peptide
PAFDKSAFVNLKQLPFFYYSDSPCE

SEQ ID NO: 12208 - protein, 25 aa, synthetic construct
  REGION 1..25: note = Description of Artificial Sequence: Synthetic peptide
PLVSSQCVNLTTRTQLPPAYTNSFT

SEQ ID NO: 12209 - protein, 25 aa, synthetic construct
  REGION 1..25: note = Description of Artificial Sequence: Synthetic peptide
LLPLVSSQCVNLTTRTQLPPAYTNS

SEQ ID NO: 12210 - protein, 25 aa, synthetic construct
  REGION 1..25: note = Description of Artificial Sequence: Synthetic peptide
LPLVSSQCVNLTTRTQLPPAYTNSF

SEQ ID NO: 12211 - protein, 25 aa, synthetic construct
  REGION 1..25: note = Description of Artificial Sequence: Synthetic peptide
GTDYKHWPQIAQFAPSASAFFGMSR

SEQ ID NO: 12212 - protein, 25 aa, synthetic construct
  REGION 1..25: note = Description of Artificial Sequence: Synthetic peptide
RIIMRLWLCWKCRSKNPLLYDANYF

SEQ ID NO: 12213 - protein, 25 aa, synthetic construct
  REGION 1..25: note = Description of Artificial Sequence: Synthetic peptide
VRIIMRLWLCWKCRSKNPLLYDANY

SEQ ID NO: 12214 - protein, 25 aa, synthetic construct
  REGION 1..25: note = Description of Artificial Sequence: Synthetic peptide
FVRIIMRLWLCWKCRSKNPLLYDAN

SEQ ID NO: 12215 - protein, 25 aa, synthetic construct
  REGION 1..25: note = Description of Artificial Sequence: Synthetic peptide
IIMRLWLCWKCRSKNPLLYDANYFL

SEQ ID NO: 12216 - protein, 25 aa, synthetic construct
  REGION 1..25: note = Description of Artificial Sequence: Synthetic peptide
ESGVKDCVVLHSYFTSDYYQLYSTQ

SEQ ID NO: 12217 - protein, 25 aa, synthetic construct
  REGION 1..25: note = Description of Artificial Sequence: Synthetic peptide
GVITHDVSSAINRPQIGVVREFLTR

SEQ ID NO: 12218 - protein, 25 aa, synthetic construct
  REGION 1..25: note = Description of Artificial Sequence: Synthetic peptide
GMSRIGMEVTPSGTWLTYTGAIKLD

SEQ ID NO: 12219 - protein, 25 aa, synthetic construct
  REGION 1..25: note = Description of Artificial Sequence: Synthetic peptide
FGMSRIGMEVTPSGTWLTYTGAIKL

SEQ ID NO: 12220 - protein, 25 aa, synthetic construct
  REGION 1..25: note = Description of Artificial Sequence: Synthetic peptide
LVAEWFLAYILFTRFFYVLGLAAIM

SEQ ID NO: 12221 - protein, 25 aa, synthetic construct
  REGION 1..25: note = Description of Artificial Sequence: Synthetic peptide
LALHRSYLTPGDSSSGWTAGAAAYY

SEQ ID NO: 12222 - protein, 25 aa, synthetic construct
  REGION 1..25: note = Description of Artificial Sequence: Synthetic peptide
QNSVRVLQKAAITILDGISQYSLRL

SEQ ID NO: 12223 - protein, 25 aa, synthetic construct
  REGION 1..25: note = Description of Artificial Sequence: Synthetic peptide
FGLVAEWFLAYILFTRFFYVLGLAA

SEQ ID NO: 12224 - protein, 25 aa, synthetic construct
  REGION 1..25: note = Description of Artificial Sequence: Synthetic peptide
ALHRSYLTPGDSSSGWTAGAAAYYV

SEQ ID NO: 12225 - protein, 25 aa, synthetic construct
  REGION 1..25: note = Description of Artificial Sequence: Synthetic peptide
GLVAEWFLAYILFTRFFYVLGLAAI

SEQ ID NO: 12226 - protein, 25 aa, synthetic construct
  REGION 1..25: note = Description of Artificial Sequence: Synthetic peptide
LLALHRSYLTPGDSSSGWTAGAAAY

SEQ ID NO: 12227 - protein, 25 aa, synthetic construct
  REGION 1..25: note = Description of Artificial Sequence: Synthetic peptide
HFGAGSDKGVAPGTAVLRQWLPTGT

SEQ ID NO: 12228 - protein, 25 aa, synthetic construct
  REGION 1..25: note = Description of Artificial Sequence: Synthetic peptide
GAGSDKGVAPGTAVLRQWLPTGTLL

SEQ ID NO: 12229 - protein, 25 aa, synthetic construct
  REGION 1..25: note = Description of Artificial Sequence: Synthetic peptide
FGAGSDKGVAPGTAVLRQWLPTGTL

SEQ ID NO: 12230 - protein, 25 aa, synthetic construct
  REGION 1..25: note = Description of Artificial Sequence: Synthetic peptide
IHFGAGSDKGVAPGTAVLRQWLPTG

SEQ ID NO: 12231 - protein, 25 aa, synthetic construct
  REGION 1..25: note = Description of Artificial Sequence: Synthetic peptide
VIHFGAGSDKGVAPGTAVLRQWLPT

SEQ ID NO: 12232 - protein, 25 aa, synthetic construct
  REGION 1..25: note = Description of Artificial Sequence: Synthetic peptide
AHKDKSAQCFKMFYKGVITHDVSSA

SEQ ID NO: 12233 - protein, 25 aa, synthetic construct
  REGION 1..25: note = Description of Artificial Sequence: Synthetic peptide
KAHKDKSAQCFKMFYKGVITHDVSS

SEQ ID NO: 12234 - protein, 25 aa, synthetic construct
  REGION 1..25: note = Description of Artificial Sequence: Synthetic peptide
HKDKSAQCFKMFYKGVITHDVSSAI

SEQ ID NO: 12235 - protein, 25 aa, synthetic construct
  REGION 1..25: note = Description of Artificial Sequence: Synthetic peptide
LKAHKDKSAQCFKMFYKGVITHDVS

SEQ ID NO: 12236 - protein, 25 aa, synthetic construct
  REGION 1..25: note = Description of Artificial Sequence: Synthetic peptide
KLKAHKDKSAQCFKMFYKGVITHDV

SEQ ID NO: 12237 - protein, 25 aa, synthetic construct
  REGION 1..25: note = Description of Artificial Sequence: Synthetic peptide
EQIDGYVMHANYIFWRNTNPIQLSS

SEQ ID NO: 12238 - protein, 25 aa, synthetic construct
  REGION 1..25: note = Description of Artificial Sequence: Synthetic peptide
KPREQIDGYVMHANYIFWRNTNPIQ

SEQ ID NO: 12239 - protein, 25 aa, synthetic construct
  REGION 1..25: note = Description of Artificial Sequence: Synthetic peptide
PREQIDGYVMHANYIFWRNTNPIQL

SEQ ID NO: 12240 - protein, 25 aa, synthetic construct
  REGION 1..25: note = Description of Artificial Sequence: Synthetic peptide
REQIDGYVMHANYIFWRNTNPIQLS

SEQ ID NO: 12241 - protein, 25 aa, synthetic construct
  REGION 1..25: note = Description of Artificial Sequence: Synthetic peptide
DYDYYRYNLPTMCDIRQLLFVVEVV

SEQ ID NO: 12242 - protein, 25 aa, synthetic construct
  REGION 1..25: note = Description of Artificial Sequence: Synthetic peptide
YDYYRYNLPTMCDIRQLLFVVEVVD

SEQ ID NO: 12243 - protein, 25 aa, synthetic construct
  REGION 1..25: note = Description of Artificial Sequence: Synthetic peptide
YFVVKRHTFSNYQHEETIYNLLKDC

SEQ ID NO: 12244 - protein, 25 aa, synthetic construct
  REGION 1..25: note = Description of Artificial Sequence: Synthetic peptide
FVVKRHTFSNYQHEETIYNLLKDCP

SEQ ID NO: 12245 - protein, 25 aa, synthetic construct
  REGION 1..25: note = Description of Artificial Sequence: Synthetic peptide
SYFVVKRHTFSNYQHEETIYNLLKD

SEQ ID NO: 12246 - protein, 25 aa, synthetic construct
  REGION 1..25: note = Description of Artificial Sequence: Synthetic peptide
FDKAGQKTYERHSLSHFVNLDNLRA

SEQ ID NO: 12247 - protein, 25 aa, synthetic construct
  REGION 1..25: note = Description of Artificial Sequence: Synthetic peptide
NMRVIHFGAGSDKGVAPGTAVLRQW

SEQ ID NO: 12248 - protein, 25 aa, synthetic construct
  REGION 1..25: note = Description of Artificial Sequence: Synthetic peptide
MRVIHFGAGSDKGVAPGTAVLRQWL

SEQ ID NO: 12249 - protein, 25 aa, synthetic construct
  REGION 1..25: note = Description of Artificial Sequence: Synthetic peptide
YFDKAGQKTYERHSLSHFVNLDNLR

SEQ ID NO: 12250 - protein, 25 aa, synthetic construct
  REGION 1..25: note = Description of Artificial Sequence: Synthetic peptide
LIRQGTDYKHWPQIAQFAPSASAFF

SEQ ID NO: 12251 - protein, 25 aa, synthetic construct
  REGION 1..25: note = Description of Artificial Sequence: Synthetic peptide
VESSSKLWAQCVQLHNDILLAKDTT

SEQ ID NO: 12252 - protein, 25 aa, synthetic construct
  REGION 1..25: note = Description of Artificial Sequence: Synthetic peptide
LRVESSSKLWAQCVQLHNDILLAKD

SEQ ID NO: 12253 - protein, 25 aa, synthetic construct
  REGION 1..25: note = Description of Artificial Sequence: Synthetic peptide
QLRVESSSKLWAQCVQLHNDILLAK

SEQ ID NO: 12254 - protein, 25 aa, synthetic construct
  REGION 1..25: note = Description of Artificial Sequence: Synthetic peptide
TISSFKWDLTAFGLVAEWFLAYILF

SEQ ID NO: 12255 - protein, 25 aa, synthetic construct
  REGION 1..25: note = Description of Artificial Sequence: Synthetic peptide
ESSSKLWAQCVQLHNDILLAKDTTE

SEQ ID NO: 12256 - protein, 25 aa, synthetic construct
  REGION 1..25: note = Description of Artificial Sequence: Synthetic peptide
ITISSFKWDLTAFGLVAEWFLAYIL

SEQ ID NO: 12257 - protein, 25 aa, synthetic construct
  REGION 1..25: note = Description of Artificial Sequence: Synthetic peptide
DQELIRQGTDYKHWPQIAQFAPSAS

SEQ ID NO: 12258 - protein, 25 aa, synthetic construct
  REGION 1..25: note = Description of Artificial Sequence: Synthetic peptide
RVESSSKLWAQCVQLHNDILLAKDT

SEQ ID NO: 12259 - protein, 25 aa, synthetic construct
  REGION 1..25: note = Description of Artificial Sequence: Synthetic peptide
ISSFKWDLTAFGLVAEWFLAYILFT

SEQ ID NO: 12260 - protein, 25 aa, synthetic construct
  REGION 1..25: note = Description of Artificial Sequence: Synthetic peptide
ELIRQGTDYKHWPQIAQFAPSASAF

SEQ ID NO: 12261 - protein, 25 aa, synthetic construct
  REGION 1..25: note = Description of Artificial Sequence: Synthetic peptide
QELIRQGTDYKHWPQIAQFAPSASA

SEQ ID NO: 12262 - protein, 25 aa, synthetic construct
  REGION 1..25: note = Description of Artificial Sequence: Synthetic peptide
ETYFTQSRNLQEFKPRSQMEIDFLE

SEQ ID NO: 12263 - protein, 25 aa, synthetic construct
  REGION 1..25: note = Description of Artificial Sequence: Synthetic peptide
TYFTQSRNLQEFKPRSQMEIDFLEL

SEQ ID NO: 12264 - protein, 25 aa, synthetic construct
  REGION 1..25: note = Description of Artificial Sequence: Synthetic peptide
YLQYIRKLHDELTGHMLDMYSVMLT

SEQ ID NO: 12265 - protein, 25 aa, synthetic construct
  REGION 1..25: note = Description of Artificial Sequence: Synthetic peptide
CALDPLSETKCTLKSFTVEKGIYQT

SEQ ID NO: 12266 - protein, 25 aa, synthetic construct
  REGION 1..25: note = Description of Artificial Sequence: Synthetic peptide
TLATCELYHYQECVRGTTVLLKEPC

SEQ ID NO: 12267 - protein, 25 aa, synthetic construct
  REGION 1..25: note = Description of Artificial Sequence: Synthetic peptide
LATCELYHYQECVRGTTVLLKEPCS

SEQ ID NO: 12268 - protein, 25 aa, synthetic construct
  REGION 1..25: note = Description of Artificial Sequence: Synthetic peptide
AITRAKVGILCIMSDRDLYDKLQFT

SEQ ID NO: 12269 - protein, 25 aa, synthetic construct
  REGION 1..25: note = Description of Artificial Sequence: Synthetic peptide
TRAKVGILCIMSDRDLYDKLQFTSL

SEQ ID NO: 12270 - protein, 25 aa, synthetic construct
  REGION 1..25: note = Description of Artificial Sequence: Synthetic peptide
AKVGILCIMSDRDLYDKLQFTSLEI

SEQ ID NO: 12271 - protein, 25 aa, synthetic construct
  REGION 1..25: note = Description of Artificial Sequence: Synthetic peptide
RAKVGILCIMSDRDLYDKLQFTSLE

SEQ ID NO: 12272 - protein, 25 aa, synthetic construct
  REGION 1..25: note = Description of Artificial Sequence: Synthetic peptide
ITRAKVGILCIMSDRDLYDKLQFTS

SEQ ID NO: 12273 - protein, 25 aa, synthetic construct
  REGION 1..25: note = Description of Artificial Sequence: Synthetic peptide
KLASHMYCSFYPPDEDEEEGDCEEE

SEQ ID NO: 12274 - protein, 25 aa, synthetic construct
  REGION 1..25: note = Description of Artificial Sequence: Synthetic peptide
ENFNQHEVLLAPLLSAGIFGADPIH

SEQ ID NO: 12275 - protein, 25 aa, synthetic construct
  REGION 1..25: note = Description of Artificial Sequence: Synthetic peptide
NLAKHCLHVVGPNVNKGEDIQLLKS

SEQ ID NO: 12276 - protein, 25 aa, synthetic construct
  REGION 1..25: note = Description of Artificial Sequence: Synthetic peptide
TWLDMVDTSLSGFKLKDCVMYASAV

SEQ ID NO: 12277 - protein, 25 aa, synthetic construct
  REGION 1..25: note = Description of Artificial Sequence: Synthetic peptide
CHNKCAYWVPRASANIGCNHTGVVG

SEQ ID NO: 12278 - protein, 25 aa, synthetic construct
  REGION 1..25: note = Description of Artificial Sequence: Synthetic peptide
EFKLASHMYCSFYPPDEDEEEGDCE

SEQ ID NO: 12279 - protein, 25 aa, synthetic construct
  REGION 1..25: note = Description of Artificial Sequence: Synthetic peptide
VGCHNKCAYWVPRASANIGCNHTGV

SEQ ID NO: 12280 - protein, 25 aa, synthetic construct
  REGION 1..25: note = Description of Artificial Sequence: Synthetic peptide
NFNQHEVLLAPLLSAGIFGADPIHS

SEQ ID NO: 12281 - protein, 25 aa, synthetic construct
  REGION 1..25: note = Description of Artificial Sequence: Synthetic peptide
YVGCHNKCAYWVPRASANIGCNHTG

SEQ ID NO: 12282 - protein, 25 aa, synthetic construct
  REGION 1..25: note = Description of Artificial Sequence: Synthetic peptide
LAKHCLHVVGPNVNKGEDIQLLKSA

SEQ ID NO: 12283 - protein, 25 aa, synthetic construct
  REGION 1..25: note = Description of Artificial Sequence: Synthetic peptide
AKHCLHVVGPNVNKGEDIQLLKSAY

SEQ ID NO: 12284 - protein, 25 aa, synthetic construct
  REGION 1..25: note = Description of Artificial Sequence: Synthetic peptide
FKLASHMYCSFYPPDEDEEEGDCEE

SEQ ID NO: 12285 - protein, 25 aa, synthetic construct
  REGION 1..25: note = Description of Artificial Sequence: Synthetic peptide
GCHNKCAYWVPRASANIGCNHTGVV

SEQ ID NO: 12286 - protein, 25 aa, synthetic construct
  REGION 1..25: note = Description of Artificial Sequence: Synthetic peptide
YEGNSPFHPLADNKFALTCFSTQFA

SEQ ID NO: 12287 - protein, 25 aa, synthetic construct
  REGION 1..25: note = Description of Artificial Sequence: Synthetic peptide
TYEGNSPFHPLADNKFALTCFSTQF

SEQ ID NO: 12288 - protein, 25 aa, synthetic construct
  REGION 1..25: note = Description of Artificial Sequence: Synthetic peptide
EIRASANLAATKMSECVLGQSKRVD

SEQ ID NO: 12289 - protein, 25 aa, synthetic construct
  REGION 1..25: note = Description of Artificial Sequence: Synthetic peptide
IRASANLAATKMSECVLGQSKRVDF

SEQ ID NO: 12290 - protein, 25 aa, synthetic construct
  REGION 1..25: note = Description of Artificial Sequence: Synthetic peptide
DGTLMIERFVSLAIDAYPLTKHPNQ

SEQ ID NO: 12291 - protein, 25 aa, synthetic construct
  REGION 1..25: note = Description of Artificial Sequence: Synthetic peptide
GTLMIERFVSLAIDAYPLTKHPNQE

SEQ ID NO: 12292 - protein, 25 aa, synthetic construct
  REGION 1..25: note = Description of Artificial Sequence: Synthetic peptide
SGTYEGNSPFHPLADNKFALTCFST

SEQ ID NO: 12293 - protein, 25 aa, synthetic construct
  REGION 1..25: note = Description of Artificial Sequence: Synthetic peptide
VIGTSKFYGGWHNMLKTVYSDVENP

SEQ ID NO: 12294 - protein, 25 aa, synthetic construct
  REGION 1..25: note = Description of Artificial Sequence: Synthetic peptide
CRSKNPLLYDANYFLCWHTNCYDYC

SEQ ID NO: 12295 - protein, 25 aa, synthetic construct
  REGION 1..25: note = Description of Artificial Sequence: Synthetic peptide
RSKNPLLYDANYFLCWHTNCYDYCI

SEQ ID NO: 12296 - protein, 25 aa, synthetic construct
  REGION 1..25: note = Description of Artificial Sequence: Synthetic peptide
GVKDCVVLHSYFTSDYYQLYSTQLS

SEQ ID NO: 12297 - protein, 25 aa, synthetic construct
  REGION 1..25: note = Description of Artificial Sequence: Synthetic peptide
VEIIKSQDLSVVSKVVKVTIDYTEI

SEQ ID NO: 12298 - protein, 25 aa, synthetic construct
  REGION 1..25: note = Description of Artificial Sequence: Synthetic peptide
KSQDLSVVSKVVKVTIDYTEISFML

SEQ ID NO: 12299 - protein, 25 aa, synthetic construct
  REGION 1..25: note = Description of Artificial Sequence: Synthetic peptide
IIKSQDLSVVSKVVKVTIDYTEISF

SEQ ID NO: 12300 - protein, 25 aa, synthetic construct
  REGION 1..25: note = Description of Artificial Sequence: Synthetic peptide
IKSQDLSVVSKVVKVTIDYTEISFM

SEQ ID NO: 12301 - protein, 25 aa, synthetic construct
  REGION 1..25: note = Description of Artificial Sequence: Synthetic peptide
EIIKSQDLSVVSKVVKVTIDYTEIS

SEQ ID NO: 12302 - protein, 25 aa, synthetic construct
  REGION 1..25: note = Description of Artificial Sequence: Synthetic peptide
FVEIIKSQDLSVVSKVVKVTIDYTE

SEQ ID NO: 12303 - protein, 25 aa, synthetic construct
  REGION 1..25: note = Description of Artificial Sequence: Synthetic peptide
YVIFTQTTETAHSCNVNRFNVAITR

SEQ ID NO: 12304 - protein, 25 aa, synthetic construct
  REGION 1..25: note = Description of Artificial Sequence: Synthetic peptide
DYVIFTQTTETAHSCNVNRFNVAIT

SEQ ID NO: 12305 - protein, 25 aa, synthetic construct
  REGION 1..25: note = Description of Artificial Sequence: Synthetic peptide
AQTGSSKCVCSVIDLLLDDFVEIIK

SEQ ID NO: 12306 - protein, 25 aa, synthetic construct
  REGION 1..25: note = Description of Artificial Sequence: Synthetic peptide
QTGSSKCVCSVIDLLLDDFVEIIKS

SEQ ID NO: 12307 - protein, 25 aa, synthetic construct
  REGION 1..25: note = Description of Artificial Sequence: Synthetic peptide
LNDFVSDADSTLIGDCATVHTANKW

SEQ ID NO: 12308 - protein, 25 aa, synthetic construct
  REGION 1..25: note = Description of Artificial Sequence: Synthetic peptide
DLNDFVSDADSTLIGDCATVHTANK

SEQ ID NO: 12309 - protein, 25 aa, synthetic construct
  REGION 1..25: note = Description of Artificial Sequence: Synthetic peptide
MPLSAPTLVPQEHYVRITGLYPTLN

SEQ ID NO: 12310 - protein, 25 aa, synthetic construct
  REGION 1..25: note = Description of Artificial Sequence: Synthetic peptide
TVMPLSAPTLVPQEHYVRITGLYPT

SEQ ID NO: 12311 - protein, 25 aa, synthetic construct
  REGION 1..25: note = Description of Artificial Sequence: Synthetic peptide
HTVMPLSAPTLVPQEHYVRITGLYP

SEQ ID NO: 12312 - protein, 25 aa, synthetic construct
  REGION 1..25: note = Description of Artificial Sequence: Synthetic peptide
VMPLSAPTLVPQEHYVRITGLYPTL

SEQ ID NO: 12313 - protein, 25 aa, synthetic construct
  REGION 1..25: note = Description of Artificial Sequence: Synthetic peptide
NHTSPDVDLGDISGINASVVNIQKE

SEQ ID NO: 12314 - protein, 25 aa, synthetic construct
  REGION 1..25: note = Description of Artificial Sequence: Synthetic peptide
SKVVKVTIDYTEISFMLWCKDGHVE

SEQ ID NO: 12315 - protein, 25 aa, synthetic construct
  REGION 1..25: note = Description of Artificial Sequence: Synthetic peptide
ANTVIWDYKRDAPAHISTIGVCSMT

SEQ ID NO: 12316 - protein, 25 aa, synthetic construct
  REGION 1..25: note = Description of Artificial Sequence: Synthetic peptide
TVIWDYKRDAPAHISTIGVCSMTDI

SEQ ID NO: 12317 - protein, 25 aa, synthetic construct
  REGION 1..25: note = Description of Artificial Sequence: Synthetic peptide
NTVIWDYKRDAPAHISTIGVCSMTD

SEQ ID NO: 12318 - protein, 25 aa, synthetic construct
  REGION 1..25: note = Description of Artificial Sequence: Synthetic peptide
VIWDYKRDAPAHISTIGVCSMTDIA

SEQ ID NO: 12319 - protein, 25 aa, synthetic construct
  REGION 1..25: note = Description of Artificial Sequence: Synthetic peptide
MYSVMLTNDNTSRYWEPEFYEAMYT

SEQ ID NO: 12320 - protein, 25 aa, synthetic construct
  REGION 1..25: note = Description of Artificial Sequence: Synthetic peptide
YSVMLTNDNTSRYWEPEFYEAMYTP

SEQ ID NO: 12321 - protein, 25 aa, synthetic construct
  REGION 1..25: note = Description of Artificial Sequence: Synthetic peptide
YFDCYDGGCINANQVIVNNLDKSAG

SEQ ID NO: 12322 - protein, 25 aa, synthetic construct
  REGION 1..25: note = Description of Artificial Sequence: Synthetic peptide
FDCYDGGCINANQVIVNNLDKSAGF

SEQ ID NO: 12323 - protein, 25 aa, synthetic construct
  REGION 1..25: note = Description of Artificial Sequence: Synthetic peptide
DCYDGGCINANQVIVNNLDKSAGFP

SEQ ID NO: 12324 - protein, 25 aa, synthetic construct
  REGION 1..25: note = Description of Artificial Sequence: Synthetic peptide
SAPTLVPQEHYVRITGLYPTLNISD

SEQ ID NO: 12325 - protein, 25 aa, synthetic construct
  REGION 1..25: note = Description of Artificial Sequence: Synthetic peptide
APTLVPQEHYVRITGLYPTLNISDE

SEQ ID NO: 12326 - protein, 25 aa, synthetic construct
  REGION 1..25: note = Description of Artificial Sequence: Synthetic peptide
PTLVPQEHYVRITGLYPTLNISDEF

SEQ ID NO: 12327 - protein, 25 aa, synthetic construct
  REGION 1..25: note = Description of Artificial Sequence: Synthetic peptide
LSAPTLVPQEHYVRITGLYPTLNIS

SEQ ID NO: 12328 - protein, 25 aa, synthetic construct
  REGION 1..25: note = Description of Artificial Sequence: Synthetic peptide
PTMCDIRQLLFVVEVVDKYFDCYDG

SEQ ID NO: 12329 - protein, 25 aa, synthetic construct
  REGION 1..25: note = Description of Artificial Sequence: Synthetic peptide
IRQLLFVVEVVDKYFDCYDGGCINA

SEQ ID NO: 12330 - protein, 25 aa, synthetic construct
  REGION 1..25: note = Description of Artificial Sequence: Synthetic peptide
NLPTMCDIRQLLFVVEVVDKYFDCY

SEQ ID NO: 12331 - protein, 25 aa, synthetic construct
  REGION 1..25: note = Description of Artificial Sequence: Synthetic peptide
LPTMCDIRQLLFVVEVVDKYFDCYD

SEQ ID NO: 12332 - protein, 25 aa, synthetic construct
  REGION 1..25: note = Description of Artificial Sequence: Synthetic peptide
RYNLPTMCDIRQLLFVVEVVDKYFD

SEQ ID NO: 12333 - protein, 25 aa, synthetic construct
  REGION 1..25: note = Description of Artificial Sequence: Synthetic peptide
DIRQLLFVVEVVDKYFDCYDGGCIN

SEQ ID NO: 12334 - protein, 25 aa, synthetic construct
  REGION 1..25: note = Description of Artificial Sequence: Synthetic peptide
YNLPTMCDIRQLLFVVEVVDKYFDC

SEQ ID NO: 12335 - protein, 25 aa, synthetic construct
  REGION 1..25: note = Description of Artificial Sequence: Synthetic peptide
VDCTMYICGDSTECSNLLLQYGSFC

SEQ ID NO: 12336 - protein, 25 aa, synthetic construct
  REGION 1..25: note = Description of Artificial Sequence: Synthetic peptide
DCTMYICGDSTECSNLLLQYGSFCT

SEQ ID NO: 12337 - protein, 25 aa, synthetic construct
  REGION 1..25: note = Description of Artificial Sequence: Synthetic peptide
EQTQGNFGDQELIRQGTDYKHWPQI

SEQ ID NO: 12338 - protein, 25 aa, synthetic construct
  REGION 1..25: note = Description of Artificial Sequence: Synthetic peptide
QGNFGDQELIRQGTDYKHWPQIAQF

SEQ ID NO: 12339 - protein, 25 aa, synthetic construct
  REGION 1..25: note = Description of Artificial Sequence: Synthetic peptide
TQGNFGDQELIRQGTDYKHWPQIAQ

SEQ ID NO: 12340 - protein, 25 aa, synthetic construct
  REGION 1..25: note = Description of Artificial Sequence: Synthetic peptide
PEQTQGNFGDQELIRQGTDYKHWPQ

SEQ ID NO: 12341 - protein, 25 aa, synthetic construct
  REGION 1..25: note = Description of Artificial Sequence: Synthetic peptide
QTQGNFGDQELIRQGTDYKHWPQIA

SEQ ID NO: 12342 - protein, 25 aa, synthetic construct
  REGION 1..25: note = Description of Artificial Sequence: Synthetic peptide
GNFGDQELIRQGTDYKHWPQIAQFA

SEQ ID NO: 12343 - protein, 25 aa, synthetic construct
  REGION 1..25: note = Description of Artificial Sequence: Synthetic peptide
FGDQELIRQGTDYKHWPQIAQFAPS

SEQ ID NO: 12344 - protein, 25 aa, synthetic construct
  REGION 1..25: note = Description of Artificial Sequence: Synthetic peptide
NFGDQELIRQGTDYKHWPQIAQFAP

SEQ ID NO: 12345 - protein, 25 aa, synthetic construct
  REGION 1..25: note = Description of Artificial Sequence: Synthetic peptide
FVSDADSTLIGDCATVHTANKWDLI

SEQ ID NO: 12346 - protein, 25 aa, synthetic construct
  REGION 1..25: note = Description of Artificial Sequence: Synthetic peptide
VSDADSTLIGDCATVHTANKWDLII

SEQ ID NO: 12347 - protein, 25 aa, synthetic construct
  REGION 1..25: note = Description of Artificial Sequence: Synthetic peptide
DFVSDADSTLIGDCATVHTANKWDL

SEQ ID NO: 12348 - protein, 25 aa, synthetic construct
  REGION 1..25: note = Description of Artificial Sequence: Synthetic peptide
LPDPSKPSKRSFIEDLLFNKVTLAD

SEQ ID NO: 12349 - protein, 25 aa, synthetic construct
  REGION 1..25: note = Description of Artificial Sequence: Synthetic peptide
KLLKSIAATRGATVVIGTSKFYGGW

SEQ ID NO: 12350 - protein, 25 aa, synthetic construct
  REGION 1..25: note = Description of Artificial Sequence: Synthetic peptide
PGDQFKHLIPLMYKGLPWNVVRIKI

SEQ ID NO: 12351 - protein, 25 aa, synthetic construct
  REGION 1..25: note = Description of Artificial Sequence: Synthetic peptide
GDQFKHLIPLMYKGLPWNVVRIKIV

SEQ ID NO: 12352 - protein, 25 aa, synthetic construct
  REGION 1..25: note = Description of Artificial Sequence: Synthetic peptide
SLFDMSKFPLKLRGTAVMSLKEGQI

SEQ ID NO: 12353 - protein, 25 aa, synthetic construct
  REGION 1..25: note = Description of Artificial Sequence: Synthetic peptide
AETLKATEETFKLSYGIATVREVLS

SEQ ID NO: 12354 - protein, 25 aa, synthetic construct
  REGION 1..25: note = Description of Artificial Sequence: Synthetic peptide
ETLKATEETFKLSYGIATVREVLSD

SEQ ID NO: 12355 - protein, 25 aa, synthetic construct
  REGION 1..25: note = Description of Artificial Sequence: Synthetic peptide
VQELYSPIFLIVAAIVFITLCFTLK

SEQ ID NO: 12356 - protein, 25 aa, synthetic construct
  REGION 1..25: note = Description of Artificial Sequence: Synthetic peptide
ELYSPIFLIVAAIVFITLCFTLKRK

SEQ ID NO: 12357 - protein, 25 aa, synthetic construct
  REGION 1..25: note = Description of Artificial Sequence: Synthetic peptide
EVQELYSPIFLIVAAIVFITLCFTL

SEQ ID NO: 12358 - protein, 25 aa, synthetic construct
  REGION 1..25: note = Description of Artificial Sequence: Synthetic peptide
QELYSPIFLIVAAIVFITLCFTLKR

SEQ ID NO: 12359 - protein, 25 aa, synthetic construct
  REGION 1..25: note = Description of Artificial Sequence: Synthetic peptide
MMGFKMNYQVNGYPNMFITREEAIR

SEQ ID NO: 12360 - protein, 25 aa, synthetic construct
  REGION 1..25: note = Description of Artificial Sequence: Synthetic peptide
MGFKMNYQVNGYPNMFITREEAIRH

SEQ ID NO: 12361 - protein, 25 aa, synthetic construct
  REGION 1..25: note = Description of Artificial Sequence: Synthetic peptide
ISMMGFKMNYQVNGYPNMFITREEA

SEQ ID NO: 12362 - protein, 25 aa, synthetic construct
  REGION 1..25: note = Description of Artificial Sequence: Synthetic peptide
SMMGFKMNYQVNGYPNMFITREEAI

SEQ ID NO: 12363 - protein, 25 aa, synthetic construct
  REGION 1..25: note = Description of Artificial Sequence: Synthetic peptide
LISMMGFKMNYQVNGYPNMFITREE

SEQ ID NO: 12364 - protein, 25 aa, synthetic construct
  REGION 1..25: note = Description of Artificial Sequence: Synthetic peptide
KGDYGDAVVYRGTTTYKLNVGDYFV

SEQ ID NO: 12365 - protein, 25 aa, synthetic construct
  REGION 1..25: note = Description of Artificial Sequence: Synthetic peptide
DYGDAVVYRGTTTYKLNVGDYFVLT

SEQ ID NO: 12366 - protein, 25 aa, synthetic construct
  REGION 1..25: note = Description of Artificial Sequence: Synthetic peptide
YGDAVVYRGTTTYKLNVGDYFVLTS

SEQ ID NO: 12367 - protein, 25 aa, synthetic construct
  REGION 1..25: note = Description of Artificial Sequence: Synthetic peptide
GDYGDAVVYRGTTTYKLNVGDYFVL

SEQ ID NO: 12368 - protein, 25 aa, synthetic construct
  REGION 1..25: note = Description of Artificial Sequence: Synthetic peptide
SVELKHFFFAQDGNAAISDYDYYRY

SEQ ID NO: 12369 - protein, 25 aa, synthetic construct
  REGION 1..25: note = Description of Artificial Sequence: Synthetic peptide
SSVELKHFFFAQDGNAAISDYDYYR

SEQ ID NO: 12370 - protein, 25 aa, synthetic construct
  REGION 1..25: note = Description of Artificial Sequence: Synthetic peptide
VELKHFFFAQDGNAAISDYDYYRYN

SEQ ID NO: 12371 - protein, 25 aa, synthetic construct
  REGION 1..25: note = Description of Artificial Sequence: Synthetic peptide
EGSSVELKHFFFAQDGNAAISDYDY

SEQ ID NO: 12372 - protein, 25 aa, synthetic construct
  REGION 1..25: note = Description of Artificial Sequence: Synthetic peptide
GSSVELKHFFFAQDGNAAISDYDYY

SEQ ID NO: 12373 - protein, 25 aa, synthetic construct
  REGION 1..25: note = Description of Artificial Sequence: Synthetic peptide
TFEKGDYGDAVVYRGTTTYKLNVGD

SEQ ID NO: 12374 - protein, 25 aa, synthetic construct
  REGION 1..25: note = Description of Artificial Sequence: Synthetic peptide
REPMLQSADAQSFLNRVCGVSAARL

SEQ ID NO: 12375 - protein, 25 aa, synthetic construct
  REGION 1..25: note = Description of Artificial Sequence: Synthetic peptide
YGCSCDQLREPMLQSADAQSFLNRV

SEQ ID NO: 12376 - protein, 25 aa, synthetic construct
  REGION 1..25: note = Description of Artificial Sequence: Synthetic peptide
CSCDQLREPMLQSADAQSFLNRVCG

SEQ ID NO: 12377 - protein, 25 aa, synthetic construct
  REGION 1..25: note = Description of Artificial Sequence: Synthetic peptide
GYGCSCDQLREPMLQSADAQSFLNG

SEQ ID NO: 12378 - protein, 25 aa, synthetic construct
  REGION 1..25: note = Description of Artificial Sequence: Synthetic peptide
DQLREPMLQSADAQSFLNRVCGVSA

SEQ ID NO: 12379 - protein, 25 aa, synthetic construct
  REGION 1..25: note = Description of Artificial Sequence: Synthetic peptide
QLREPMLQSADAQSFLNRVCGVSAA

SEQ ID NO: 12380 - protein, 25 aa, synthetic construct
  REGION 1..25: note = Description of Artificial Sequence: Synthetic peptide
CDQLREPMLQSADAQSFLNRVCGVS

SEQ ID NO: 12381 - protein, 25 aa, synthetic construct
  REGION 1..25: note = Description of Artificial Sequence: Synthetic peptide
GYGCSCDQLREPMLQSADAQSFLNR

SEQ ID NO: 12382 - protein, 25 aa, synthetic construct
  REGION 1..25: note = Description of Artificial Sequence: Synthetic peptide
SCDQLREPMLQSADAQSFLNRVCGV

SEQ ID NO: 12383 - protein, 25 aa, synthetic construct
  REGION 1..25: note = Description of Artificial Sequence: Synthetic peptide
LREPMLQSADAQSFLNRVCGVSAAR

SEQ ID NO: 12384 - protein, 25 aa, synthetic construct
  REGION 1..25: note = Description of Artificial Sequence: Synthetic peptide
GCSCDQLREPMLQSADAQSFLNRVC

SEQ ID NO: 12385 - protein, 25 aa, synthetic construct
  REGION 1..25: note = Description of Artificial Sequence: Synthetic peptide
IGPERTCCLCDRRATCFSTASDTYA

SEQ ID NO: 12386 - protein, 25 aa, synthetic construct
  REGION 1..25: note = Description of Artificial Sequence: Synthetic peptide
GPERTCCLCDRRATCFSTASDTYAC

SEQ ID NO: 12387 - protein, 25 aa, synthetic construct
  REGION 1..25: note = Description of Artificial Sequence: Synthetic peptide
FKNLREFVFKNIDGYFKIYSKHTPI

SEQ ID NO: 12388 - protein, 25 aa, synthetic construct
  REGION 1..25: note = Description of Artificial Sequence: Synthetic peptide
VRFPNITNLCPFGEVFNATRFASVY

SEQ ID NO: 12389 - protein, 25 aa, synthetic construct
  REGION 1..25: note = Description of Artificial Sequence: Synthetic peptide
IVRFPNITNLCPFGEVFNATRFASV

SEQ ID NO: 12390 - protein, 25 aa, synthetic construct
  REGION 1..25: note = Description of Artificial Sequence: Synthetic peptide
ESIVRFPNITNLCPFGEVFNATRFA

SEQ ID NO: 12391 - protein, 25 aa, synthetic construct
  REGION 1..25: note = Description of Artificial Sequence: Synthetic peptide
TESIVRFPNITNLCPFGEVFNATRF

SEQ ID NO: 12392 - protein, 25 aa, synthetic construct
  REGION 1..25: note = Description of Artificial Sequence: Synthetic peptide
SIVRFPNITNLCPFGEVFNATRFAS

SEQ ID NO: 12393 - protein, 25 aa, synthetic construct
  REGION 1..25: note = Description of Artificial Sequence: Synthetic peptide
HQKLLKSIAATRGATVVIGTSKFYG

SEQ ID NO: 12394 - protein, 25 aa, synthetic construct
  REGION 1..25: note = Description of Artificial Sequence: Synthetic peptide
QKLLKSIAATRGATVVIGTSKFYGG

SEQ ID NO: 12395 - protein, 25 aa, synthetic construct
  REGION 1..25: note = Description of Artificial Sequence: Synthetic peptide
FHQKLLKSIAATRGATVVIGTSKFY

SEQ ID NO: 12396 - protein, 25 aa, synthetic construct
  REGION 1..25: note = Description of Artificial Sequence: Synthetic peptide
VTIDYTEISFMLWCKDGHVETFYPK

SEQ ID NO: 12397 - protein, 25 aa, synthetic construct
  REGION 1..25: note = Description of Artificial Sequence: Synthetic peptide
TEISFMLWCKDGHVETFYPKLQSSQ

SEQ ID NO: 12398 - protein, 25 aa, synthetic construct
  REGION 1..25: note = Description of Artificial Sequence: Synthetic peptide
VVKVTIDYTEISFMLWCKDGHVETF

SEQ ID NO: 12399 - protein, 25 aa, synthetic construct
  REGION 1..25: note = Description of Artificial Sequence: Synthetic peptide
IDYTEISFMLWCKDGHVETFYPKLQ

SEQ ID NO: 12400 - protein, 25 aa, synthetic construct
  REGION 1..25: note = Description of Artificial Sequence: Synthetic peptide
YTEISFMLWCKDGHVETFYPKLQSS

SEQ ID NO: 12401 - protein, 25 aa, synthetic construct
  REGION 1..25: note = Description of Artificial Sequence: Synthetic peptide
VKVTIDYTEISFMLWCKDGHVETFY

SEQ ID NO: 12402 - protein, 25 aa, synthetic construct
  REGION 1..25: note = Description of Artificial Sequence: Synthetic peptide
TIDYTEISFMLWCKDGHVETFYPKL

SEQ ID NO: 12403 - protein, 25 aa, synthetic construct
  REGION 1..25: note = Description of Artificial Sequence: Synthetic peptide
KVTIDYTEISFMLWCKDGHVETFYP

SEQ ID NO: 12404 - protein, 25 aa, synthetic construct
  REGION 1..25: note = Description of Artificial Sequence: Synthetic peptide
DYTEISFMLWCKDGHVETFYPKLQS

SEQ ID NO: 12405 - protein, 25 aa, synthetic construct
  REGION 1..25: note = Description of Artificial Sequence: Synthetic peptide
NSIAIPTNFTISVTTEILPVSMTKT

SEQ ID NO: 12406 - protein, 25 aa, synthetic construct
  REGION 1..25: note = Description of Artificial Sequence: Synthetic peptide
AIPTNFTISVTTEILPVSMTKTSVD

SEQ ID NO: 12407 - protein, 25 aa, synthetic construct
  REGION 1..25: note = Description of Artificial Sequence: Synthetic peptide
SNNSIAIPTNFTISVTTEILPVSMT

SEQ ID NO: 12408 - protein, 25 aa, synthetic construct
  REGION 1..25: note = Description of Artificial Sequence: Synthetic peptide
IPTNFTISVTTEILPVSMTKTSVDC

SEQ ID NO: 12409 - protein, 25 aa, synthetic construct
  REGION 1..25: note = Description of Artificial Sequence: Synthetic peptide
YSNNSIAIPTNFTISVTTEILPVSM

SEQ ID NO: 12410 - protein, 25 aa, synthetic construct
  REGION 1..25: note = Description of Artificial Sequence: Synthetic peptide
IAIPTNFTISVTTEILPVSMTKTSV

SEQ ID NO: 12411 - protein, 25 aa, synthetic construct
  REGION 1..25: note = Description of Artificial Sequence: Synthetic peptide
AYSNNSIAIPTNFTISVTTEILPVS

SEQ ID NO: 12412 - protein, 25 aa, synthetic construct
  REGION 1..25: note = Description of Artificial Sequence: Synthetic peptide
SIAIPTNFTISVTTEILPVSMTKTS

SEQ ID NO: 12413 - protein, 25 aa, synthetic construct
  REGION 1..25: note = Description of Artificial Sequence: Synthetic peptide
NNSIAIPTNFTISVTTEILPVSMTK

SEQ ID NO: 12414 - protein, 25 aa, synthetic construct
  REGION 1..25: note = Description of Artificial Sequence: Synthetic peptide
VAYSNNSIAIPTNFTISVTTEILPV

SEQ ID NO: 12415 - protein, 25 aa, synthetic construct
  REGION 1..25: note = Description of Artificial Sequence: Synthetic peptide
PKDMTYRRLISMMGFKMNYQVNGYP

SEQ ID NO: 12416 - protein, 25 aa, synthetic construct
  REGION 1..25: note = Description of Artificial Sequence: Synthetic peptide
KDMTYRRLISMMGFKMNYQVNGYPN

SEQ ID NO: 12417 - protein, 25 aa, synthetic construct
  REGION 1..25: note = Description of Artificial Sequence: Synthetic peptide
KCVPQADVEWKFYDAQPCSDKAYKI

SEQ ID NO: 12418 - protein, 25 aa, synthetic construct
  REGION 1..25: note = Description of Artificial Sequence: Synthetic peptide
MFHLVDFQVTIAEILLIIMRTFKVS

SEQ ID NO: 12419 - protein, 25 aa, synthetic construct
  REGION 1..25: note = Description of Artificial Sequence: Synthetic peptide
EETFKLSYGIATVREVLSDRELHLS

SEQ ID NO: 12420 - protein, 25 aa, synthetic construct
  REGION 1..25: note = Description of Artificial Sequence: Synthetic peptide
TFKLSYGIATVREVLSDRELHLSWE

SEQ ID NO: 12421 - protein, 25 aa, synthetic construct
  REGION 1..25: note = Description of Artificial Sequence: Synthetic peptide
FKLSYGIATVREVLSDRELHLSWEV

SEQ ID NO: 12422 - protein, 25 aa, synthetic construct
  REGION 1..25: note = Description of Artificial Sequence: Synthetic peptide
ETFKLSYGIATVREVLSDRELHLSW

SEQ ID NO: 12423 - protein, 25 aa, synthetic construct
  REGION 1..25: note = Description of Artificial Sequence: Synthetic peptide
KVDGVDVELFENKTTLPVNVAFELW

SEQ ID NO: 12424 - protein, 25 aa, synthetic construct
  REGION 1..25: note = Description of Artificial Sequence: Synthetic peptide
DGVDVELFENKTTLPVNVAFELWAK

SEQ ID NO: 12425 - protein, 25 aa, synthetic construct
  REGION 1..25: note = Description of Artificial Sequence: Synthetic peptide
VDGVDVELFENKTTLPVNVAFELWA

SEQ ID NO: 12426 - protein, 25 aa, synthetic construct
  REGION 1..25: note = Description of Artificial Sequence: Synthetic peptide
YQTQTNSPRRARSVASQSIIAYTMS

SEQ ID NO: 12427 - protein, 25 aa, synthetic construct
  REGION 1..25: note = Description of Artificial Sequence: Synthetic peptide
SYQTQTNSPRRARSVASQSIIAYTM

SEQ ID NO: 12428 - protein, 25 aa, synthetic construct
  REGION 1..25: note = Description of Artificial Sequence: Synthetic peptide
AKKPTETICAPLTVFFDGRVDGQVD

SEQ ID NO: 12429 - protein, 25 aa, synthetic construct
  REGION 1..25: note = Description of Artificial Sequence: Synthetic peptide
IAKKPTETICAPLTVFFDGRVDGQV

SEQ ID NO: 12430 - protein, 25 aa, synthetic construct
  REGION 1..25: note = Description of Artificial Sequence: Synthetic peptide
KKPTETICAPLTVFFDGRVDGQVDL

SEQ ID NO: 12431 - protein, 25 aa, synthetic construct
  REGION 1..25: note = Description of Artificial Sequence: Synthetic peptide
PTETICAPLTVFFDGRVDGQVDLFR

SEQ ID NO: 12432 - protein, 25 aa, synthetic construct
  REGION 1..25: note = Description of Artificial Sequence: Synthetic peptide
TETICAPLTVFFDGRVDGQVDLFRN

SEQ ID NO: 12433 - protein, 25 aa, synthetic construct
  REGION 1..25: note = Description of Artificial Sequence: Synthetic peptide
KPTETICAPLTVFFDGRVDGQVDLF

SEQ ID NO: 12434 - protein, 25 aa, synthetic construct
  REGION 1..25: note = Description of Artificial Sequence: Synthetic peptide
YPANSIVCRFDTRVLSNLNLPGCDG

SEQ ID NO: 12435 - protein, 25 aa, synthetic construct
  REGION 1..25: note = Description of Artificial Sequence: Synthetic peptide
PANSIVCRFDTRVLSNLNLPGCDGG

SEQ ID NO: 12436 - protein, 25 aa, synthetic construct
  REGION 1..25: note = Description of Artificial Sequence: Synthetic peptide
DGNAAISDYDYYRYNLPTMCDIRQL

SEQ ID NO: 12437 - protein, 25 aa, synthetic construct
  REGION 1..25: note = Description of Artificial Sequence: Synthetic peptide
ISDYDYYRYNLPTMCDIRQLLFVVE

SEQ ID NO: 12438 - protein, 25 aa, synthetic construct
  REGION 1..25: note = Description of Artificial Sequence: Synthetic peptide
AISDYDYYRYNLPTMCDIRQLLFVV

SEQ ID NO: 12439 - protein, 25 aa, synthetic construct
  REGION 1..25: note = Description of Artificial Sequence: Synthetic peptide
GNAAISDYDYYRYNLPTMCDIRQLL

SEQ ID NO: 12440 - protein, 25 aa, synthetic construct
  REGION 1..25: note = Description of Artificial Sequence: Synthetic peptide
AAISDYDYYRYNLPTMCDIRQLLFV

SEQ ID NO: 12441 - protein, 25 aa, synthetic construct
  REGION 1..25: note = Description of Artificial Sequence: Synthetic peptide
NAAISDYDYYRYNLPTMCDIRQLLF

SEQ ID NO: 12442 - protein, 25 aa, synthetic construct
  REGION 1..25: note = Description of Artificial Sequence: Synthetic peptide
SGVPVVDSYYSLLMPILTLTRALTA

SEQ ID NO: 12443 - protein, 25 aa, synthetic construct
  REGION 1..25: note = Description of Artificial Sequence: Synthetic peptide
PGSGVPVVDSYYSLLMPILTLTRAL

SEQ ID NO: 12444 - protein, 25 aa, synthetic construct
  REGION 1..25: note = Description of Artificial Sequence: Synthetic peptide
GSGVPVVDSYYSLLMPILTLTRALT

SEQ ID NO: 12445 - protein, 25 aa, synthetic construct
  REGION 1..25: note = Description of Artificial Sequence: Synthetic peptide
IKIVQMLSDTLKNLSDRVVFVLWAH

SEQ ID NO: 12446 - protein, 25 aa, synthetic construct
  REGION 1..25: note = Description of Artificial Sequence: Synthetic peptide
RIKIVQMLSDTLKNLSDRVVFVLWA

SEQ ID NO: 12447 - protein, 25 aa, synthetic construct
  REGION 1..25: note = Description of Artificial Sequence: Synthetic peptide
GQINDMILSLLSKGRLIIRENNRVV

SEQ ID NO: 12448 - protein, 25 aa, synthetic construct
  REGION 1..25: note = Description of Artificial Sequence: Synthetic peptide
KVFRSSVLHSTQDLFLPFFSNVTWF

SEQ ID NO: 12449 - protein, 25 aa, synthetic construct
  REGION 1..25: note = Description of Artificial Sequence: Synthetic peptide
RSSVLHSTQDLFLPFFSNVTWFHAI

SEQ ID NO: 12450 - protein, 25 aa, synthetic construct
  REGION 1..25: note = Description of Artificial Sequence: Synthetic peptide
VFRSSVLHSTQDLFLPFFSNVTWFH

SEQ ID NO: 12451 - protein, 25 aa, synthetic construct
  REGION 1..25: note = Description of Artificial Sequence: Synthetic peptide
SSVLHSTQDLFLPFFSNVTWFHAIH

SEQ ID NO: 12452 - protein, 25 aa, synthetic construct
  REGION 1..25: note = Description of Artificial Sequence: Synthetic peptide
FRSSVLHSTQDLFLPFFSNVTWFHA

SEQ ID NO: 12453 - protein, 25 aa, synthetic construct
  REGION 1..25: note = Description of Artificial Sequence: Synthetic peptide
TLDSKTQSLLIVNNATNVVIKVCEF

SEQ ID NO: 12454 - protein, 25 aa, synthetic construct
  REGION 1..25: note = Description of Artificial Sequence: Synthetic peptide
GTTLDSKTQSLLIVNNATNVVIKVC

SEQ ID NO: 12455 - protein, 25 aa, synthetic construct
  REGION 1..25: note = Description of Artificial Sequence: Synthetic peptide
DSKTQSLLIVNNATNVVIKVCEFQF

SEQ ID NO: 12456 - protein, 25 aa, synthetic construct
  REGION 1..25: note = Description of Artificial Sequence: Synthetic peptide
TTLDSKTQSLLIVNNATNVVIKVCE

SEQ ID NO: 12457 - protein, 25 aa, synthetic construct
  REGION 1..25: note = Description of Artificial Sequence: Synthetic peptide
LDSKTQSLLIVNNATNVVIKVCEFQ

SEQ ID NO: 12458 - protein, 25 aa, synthetic construct
  REGION 1..25: note = Description of Artificial Sequence: Synthetic peptide
FKIYSKHTPINLVRDLPQGFSALEP

SEQ ID NO: 12459 - protein, 25 aa, synthetic construct
  REGION 1..25: note = Description of Artificial Sequence: Synthetic peptide
YSKHTPINLVRDLPQGFSALEPLVD

SEQ ID NO: 12460 - protein, 25 aa, synthetic construct
  REGION 1..25: note = Description of Artificial Sequence: Synthetic peptide
IYSKHTPINLVRDLPQGFSALEPLV

SEQ ID NO: 12461 - protein, 25 aa, synthetic construct
  REGION 1..25: note = Description of Artificial Sequence: Synthetic peptide
SKHTPINLVRDLPQGFSALEPLVDL

SEQ ID NO: 12462 - protein, 25 aa, synthetic construct
  REGION 1..25: note = Description of Artificial Sequence: Synthetic peptide
GYFKIYSKHTPINLVRDLPQGFSAL

SEQ ID NO: 12463 - protein, 25 aa, synthetic construct
  REGION 1..25: note = Description of Artificial Sequence: Synthetic peptide
YFKIYSKHTPINLVRDLPQGFSALE

SEQ ID NO: 12464 - protein, 25 aa, synthetic construct
  REGION 1..25: note = Description of Artificial Sequence: Synthetic peptide
KIYSKHTPINLVRDLPQGFSALEPL

SEQ ID NO: 12465 - protein, 25 aa, synthetic construct
  REGION 1..25: note = Description of Artificial Sequence: Synthetic peptide
PISFPLCANGQVFGLYKNTCVGSDN

SEQ ID NO: 12466 - protein, 25 aa, synthetic construct
  REGION 1..25: note = Description of Artificial Sequence: Synthetic peptide
EYVSQPFLMDLEGKQGNFKNLREFV

SEQ ID NO: 12467 - protein, 25 aa, synthetic construct
  REGION 1..25: note = Description of Artificial Sequence: Synthetic peptide
KGVITHDVSSAINRPQIGVVREFLT

SEQ ID NO: 12468 - protein, 25 aa, synthetic construct
  REGION 1..25: note = Description of Artificial Sequence: Synthetic peptide
RPLLESELVIGAVILRGHLRIAGHH

SEQ ID NO: 12469 - protein, 25 aa, synthetic construct
  REGION 1..25: note = Description of Artificial Sequence: Synthetic peptide
PLLESELVIGAVILRGHLRIAGHHL

SEQ ID NO: 12470 - protein, 25 aa, synthetic construct
  REGION 1..25: note = Description of Artificial Sequence: Synthetic peptide
LLESELVIGAVILRGHLRIAGHHLG

SEQ ID NO: 12471 - protein, 25 aa, synthetic construct
  REGION 1..25: note = Description of Artificial Sequence: Synthetic peptide
FMLWCKDGHVETFYPKLQSSQAWQP

SEQ ID NO: 12472 - protein, 25 aa, synthetic construct
  REGION 1..25: note = Description of Artificial Sequence: Synthetic peptide
MLWCKDGHVETFYPKLQSSQAWQPG

SEQ ID NO: 12473 - protein, 25 aa, synthetic construct
  REGION 1..25: note = Description of Artificial Sequence: Synthetic peptide
KDKSAQCFKMFYKGVITHDVSSAIN

SEQ ID NO: 12474 - protein, 25 aa, synthetic construct
  REGION 1..25: note = Description of Artificial Sequence: Synthetic peptide
ETAHSCNVNRFNVAITRAKVGILCI

SEQ ID NO: 12475 - protein, 25 aa, synthetic construct
  REGION 1..25: note = Description of Artificial Sequence: Synthetic peptide
SCNVNRFNVAITRAKVGILCIMSDR

SEQ ID NO: 12476 - protein, 25 aa, synthetic construct
  REGION 1..25: note = Description of Artificial Sequence: Synthetic peptide
HSCNVNRFNVAITRAKVGILCIMSD

SEQ ID NO: 12477 - protein, 25 aa, synthetic construct
  REGION 1..25: note = Description of Artificial Sequence: Synthetic peptide
AHSCNVNRFNVAITRAKVGILCIMS

SEQ ID NO: 12478 - protein, 25 aa, synthetic construct
  REGION 1..25: note = Description of Artificial Sequence: Synthetic peptide
TAHSCNVNRFNVAITRAKVGILCIM

SEQ ID NO: 12479 - protein, 25 aa, synthetic construct
  REGION 1..25: note = Description of Artificial Sequence: Synthetic peptide
CQEPKLGSLVVRCSFYEDFLEYHDV

SEQ ID NO: 12480 - protein, 25 aa, synthetic construct
  REGION 1..25: note = Description of Artificial Sequence: Synthetic peptide
QEPKLGSLVVRCSFYEDFLEYHDVR

SEQ ID NO: 12481 - protein, 25 aa, synthetic construct
  REGION 1..25: note = Description of Artificial Sequence: Synthetic peptide
LFMRIFTIGTVTLKQGEIKDATPSD

SEQ ID NO: 12482 - protein, 25 aa, synthetic construct
  REGION 1..25: note = Description of Artificial Sequence: Synthetic peptide
FMRIFTIGTVTLKQGEIKDATPSDF

SEQ ID NO: 12483 - protein, 25 aa, synthetic construct
  REGION 1..25: note = Description of Artificial Sequence: Synthetic peptide
VATLQAENVTGLFKDCSKVITGLHP

SEQ ID NO: 12484 - protein, 25 aa, synthetic construct
  REGION 1..25: note = Description of Artificial Sequence: Synthetic peptide
LQAENVTGLFKDCSKVITGLHPTQA

SEQ ID NO: 12485 - protein, 25 aa, synthetic construct
  REGION 1..25: note = Description of Artificial Sequence: Synthetic peptide
ATLQAENVTGLFKDCSKVITGLHPT

SEQ ID NO: 12486 - protein, 25 aa, synthetic construct
  REGION 1..25: note = Description of Artificial Sequence: Synthetic peptide
TLQAENVTGLFKDCSKVITGLHPTQ

SEQ ID NO: 12487 - protein, 25 aa, synthetic construct
  REGION 1..25: note = Description of Artificial Sequence: Synthetic peptide
AENVTGLFKDCSKVITGLHPTQAPT

SEQ ID NO: 12488 - protein, 25 aa, synthetic construct
  REGION 1..25: note = Description of Artificial Sequence: Synthetic peptide
QAENVTGLFKDCSKVITGLHPTQAP

SEQ ID NO: 12489 - protein, 25 aa, synthetic construct
  REGION 1..25: note = Description of Artificial Sequence: Synthetic peptide
NVATLQAENVTGLFKDCSKVITGLH

SEQ ID NO: 12490 - protein, 25 aa, synthetic construct
  REGION 1..25: note = Description of Artificial Sequence: Synthetic peptide
TSRTLSYYKLGASQRVAGDSGFAAY

SEQ ID NO: 12491 - protein, 25 aa, synthetic construct
  REGION 1..25: note = Description of Artificial Sequence: Synthetic peptide
ATSRTLSYYKLGASQRVAGDSGFAA

SEQ ID NO: 12492 - protein, 25 aa, synthetic construct
  REGION 1..25: note = Description of Artificial Sequence: Synthetic peptide
PFTINCQEPKLGSLVVRCSFYEDFL

SEQ ID NO: 12493 - protein, 25 aa, synthetic construct
  REGION 1..25: note = Description of Artificial Sequence: Synthetic peptide
TINCQEPKLGSLVVRCSFYEDFLEY

SEQ ID NO: 12494 - protein, 25 aa, synthetic construct
  REGION 1..25: note = Description of Artificial Sequence: Synthetic peptide
FTINCQEPKLGSLVVRCSFYEDFLE

SEQ ID NO: 12495 - protein, 25 aa, synthetic construct
  REGION 1..25: note = Description of Artificial Sequence: Synthetic peptide
NRALTGIAVEQDKNTQEVFAQVKQI

SEQ ID NO: 12496 - protein, 25 aa, synthetic construct
  REGION 1..25: note = Description of Artificial Sequence: Synthetic peptide
VYGDFSHSQLGGLHLLIGLAKRFKE

SEQ ID NO: 12497 - protein, 25 aa, synthetic construct
  REGION 1..25: note = Description of Artificial Sequence: Synthetic peptide
EHVTFFIYNKIVDEPEEHVQIHTID

SEQ ID NO: 12498 - protein, 25 aa, synthetic construct
  REGION 1..25: note = Description of Artificial Sequence: Synthetic peptide
VTFFIYNKIVDEPEEHVQIHTIDGS

SEQ ID NO: 12499 - protein, 25 aa, synthetic construct
  REGION 1..25: note = Description of Artificial Sequence: Synthetic peptide
HVTFFIYNKIVDEPEEHVQIHTIDG

SEQ ID NO: 12500 - protein, 25 aa, synthetic construct
  REGION 1..25: note = Description of Artificial Sequence: Synthetic peptide
DWTIEYPIIGDELKINAACRKVQHM

SEQ ID NO: 12501 - protein, 25 aa, synthetic construct
  REGION 1..25: note = Description of Artificial Sequence: Synthetic peptide
IIGDELKINAACRKVQHMVVKAALL

SEQ ID NO: 12502 - protein, 25 aa, synthetic construct
  REGION 1..25: note = Description of Artificial Sequence: Synthetic peptide
VDWTIEYPIIGDELKINAACRKVQH

SEQ ID NO: 12503 - protein, 25 aa, synthetic construct
  REGION 1..25: note = Description of Artificial Sequence: Synthetic peptide
IGDELKINAACRKVQHMVVKAALLA

SEQ ID NO: 12504 - protein, 25 aa, synthetic construct
  REGION 1..25: note = Description of Artificial Sequence: Synthetic peptide
VTLACFVLAAVYRINWITGGIAIAM

SEQ ID NO: 12505 - protein, 25 aa, synthetic construct
  REGION 1..25: note = Description of Artificial Sequence: Synthetic peptide
TTADIVVFDEISMATNYDLSVVNAR

SEQ ID NO: 12506 - protein, 25 aa, synthetic construct
  REGION 1..25: note = Description of Artificial Sequence: Synthetic peptide
CWTETDLTKGPHEFCSQHTMLVKQG

SEQ ID NO: 12507 - protein, 25 aa, synthetic construct
  REGION 1..25: note = Description of Artificial Sequence: Synthetic peptide
WTETDLTKGPHEFCSQHTMLVKQGD

SEQ ID NO: 12508 - protein, 25 aa, synthetic construct
  REGION 1..25: note = Description of Artificial Sequence: Synthetic peptide
VVYRGTTTYKLNVGDYFVLTSHTVM

SEQ ID NO: 12509 - protein, 25 aa, synthetic construct
  REGION 1..25: note = Description of Artificial Sequence: Synthetic peptide
ACFVLAAVYRINWITGGIAIAMACL

SEQ ID NO: 12510 - protein, 25 aa, synthetic construct
  REGION 1..25: note = Description of Artificial Sequence: Synthetic peptide
DKVAGFAKFLKTNCCRFQEKDEDDN

SEQ ID NO: 12511 - protein, 25 aa, synthetic construct
  REGION 1..25: note = Description of Artificial Sequence: Synthetic peptide
DETQALPQRQKKQQTVTLLPAADLD

SEQ ID NO: 12512 - protein, 25 aa, synthetic construct
  REGION 1..25: note = Description of Artificial Sequence: Synthetic peptide
IGEYTFEKGDYGDAVVYRGTTTYKL

SEQ ID NO: 12513 - protein, 25 aa, synthetic construct
  REGION 1..25: note = Description of Artificial Sequence: Synthetic peptide
QIGEYTFEKGDYGDAVVYRGTTTYK

SEQ ID NO: 12514 - protein, 25 aa, synthetic construct
  REGION 1..25: note = Description of Artificial Sequence: Synthetic peptide
TVVIGTSKFYGGWHNMLKTVYSDVE

SEQ ID NO: 12515 - protein, 25 aa, synthetic construct
  REGION 1..25: note = Description of Artificial Sequence: Synthetic peptide
FPPTSFGPLVRKIFVDGVPFVVSTG

SEQ ID NO: 12516 - protein, 25 aa, synthetic construct
  REGION 1..25: note = Description of Artificial Sequence: Synthetic peptide
VLFSTVFPPTSFGPLVRKIFVDGVP

SEQ ID NO: 12517 - protein, 25 aa, synthetic construct
  REGION 1..25: note = Description of Artificial Sequence: Synthetic peptide
VFPPTSFGPLVRKIFVDGVPFVVST

SEQ ID NO: 12518 - protein, 25 aa, synthetic construct
  REGION 1..25: note = Description of Artificial Sequence: Synthetic peptide
FSTVFPPTSFGPLVRKIFVDGVPFV

SEQ ID NO: 12519 - protein, 25 aa, synthetic construct
  REGION 1..25: note = Description of Artificial Sequence: Synthetic peptide
TVFPPTSFGPLVRKIFVDGVPFVVS

SEQ ID NO: 12520 - protein, 25 aa, synthetic construct
  REGION 1..25: note = Description of Artificial Sequence: Synthetic peptide
LFSTVFPPTSFGPLVRKIFVDGVPF

SEQ ID NO: 12521 - protein, 25 aa, synthetic construct
  REGION 1..25: note = Description of Artificial Sequence: Synthetic peptide
STVFPPTSFGPLVRKIFVDGVPFVV

SEQ ID NO: 12522 - protein, 25 aa, synthetic construct
  REGION 1..25: note = Description of Artificial Sequence: Synthetic peptide
STDTGVEHVTFFIYNKIVDEPEEHV

SEQ ID NO: 12523 - protein, 25 aa, synthetic construct
  REGION 1..25: note = Description of Artificial Sequence: Synthetic peptide
LSTDTGVEHVTFFIYNKIVDEPEEH

SEQ ID NO: 12524 - protein, 25 aa, synthetic construct
  REGION 1..25: note = Description of Artificial Sequence: Synthetic peptide
VECFDKFKVNSTLEQYVFCTVNALP

SEQ ID NO: 12525 - protein, 25 aa, synthetic construct
  REGION 1..25: note = Description of Artificial Sequence: Synthetic peptide
PARARVECFDKFKVNSTLEQYVFCT

SEQ ID NO: 12526 - protein, 25 aa, synthetic construct
  REGION 1..25: note = Description of Artificial Sequence: Synthetic peptide
ARVECFDKFKVNSTLEQYVFCTVNA

SEQ ID NO: 12527 - protein, 25 aa, synthetic construct
  REGION 1..25: note = Description of Artificial Sequence: Synthetic peptide
RVECFDKFKVNSTLEQYVFCTVNAL

SEQ ID NO: 12528 - protein, 25 aa, synthetic construct
  REGION 1..25: note = Description of Artificial Sequence: Synthetic peptide
ARARVECFDKFKVNSTLEQYVFCTV

SEQ ID NO: 12529 - protein, 25 aa, synthetic construct
  REGION 1..25: note = Description of Artificial Sequence: Synthetic peptide
RARVECFDKFKVNSTLEQYVFCTVN

SEQ ID NO: 12530 - protein, 25 aa, synthetic construct
  REGION 1..25: note = Description of Artificial Sequence: Synthetic peptide
AWNSNNLDSKVGGNYNYLYRLFRKS

SEQ ID NO: 12531 - protein, 25 aa, synthetic construct
  REGION 1..25: note = Description of Artificial Sequence: Synthetic peptide
SQLGGLHLLIGLAKRFKESPFELED

SEQ ID NO: 12532 - protein, 25 aa, synthetic construct
  REGION 1..25: note = Description of Artificial Sequence: Synthetic peptide
LGGLHLLIGLAKRFKESPFELEDFI

SEQ ID NO: 12533 - protein, 25 aa, synthetic construct
  REGION 1..25: note = Description of Artificial Sequence: Synthetic peptide
GGLHLLIGLAKRFKESPFELEDFIP

SEQ ID NO: 12534 - protein, 25 aa, synthetic construct
  REGION 1..25: note = Description of Artificial Sequence: Synthetic peptide
QLGGLHLLIGLAKRFKESPFELEDF

SEQ ID NO: 12535 - protein, 25 aa, synthetic construct
  REGION 1..25: note = Description of Artificial Sequence: Synthetic peptide
RIGMEVTPSGTWLTYTGAIKLDDKD

SEQ ID NO: 12536 - protein, 25 aa, synthetic construct
  REGION 1..25: note = Description of Artificial Sequence: Synthetic peptide
IAATRGATVVIGTSKFYGGWHNMLK

SEQ ID NO: 12537 - protein, 25 aa, synthetic construct
  REGION 1..25: note = Description of Artificial Sequence: Synthetic peptide
KSIAATRGATVVIGTSKFYGGWHNM

SEQ ID NO: 12538 - protein, 25 aa, synthetic construct
  REGION 1..25: note = Description of Artificial Sequence: Synthetic peptide
SIAATRGATVVIGTSKFYGGWHNML

SEQ ID NO: 12539 - protein, 25 aa, synthetic construct
  REGION 1..25: note = Description of Artificial Sequence: Synthetic peptide
LPFGWLIVGVALLAVFQSASKIITL

SEQ ID NO: 12540 - protein, 25 aa, synthetic construct
  REGION 1..25: note = Description of Artificial Sequence: Synthetic peptide
SLPFGWLIVGVALLAVFQSASKIIT

SEQ ID NO: 12541 - protein, 25 aa, synthetic construct
  REGION 1..25: note = Description of Artificial Sequence: Synthetic peptide
DLLKYDFTEERLKLFDRYFKYWDQT

SEQ ID NO: 12542 - protein, 25 aa, synthetic construct
  REGION 1..25: note = Description of Artificial Sequence: Synthetic peptide
CRLMKTIGPDMFLGTCRRCPAEIVD

SEQ ID NO: 12543 - protein, 25 aa, synthetic construct
  REGION 1..25: note = Description of Artificial Sequence: Synthetic peptide
INDMILSLLSKGRLIIRENNRVVIS

SEQ ID NO: 12544 - protein, 25 aa, synthetic construct
  REGION 1..25: note = Description of Artificial Sequence: Synthetic peptide
NDMILSLLSKGRLIIRENNRVVISS

SEQ ID NO: 12545 - protein, 25 aa, synthetic construct
  REGION 1..25: note = Description of Artificial Sequence: Synthetic peptide
MIERFVSLAIDAYPLTKHPNQEYAD

SEQ ID NO: 12546 - protein, 25 aa, synthetic construct
  REGION 1..25: note = Description of Artificial Sequence: Synthetic peptide
SIGFDYVYNPFMIDVQQWGFTGNLQ

SEQ ID NO: 12547 - protein, 25 aa, synthetic construct
  REGION 1..25: note = Description of Artificial Sequence: Synthetic peptide
IGFDYVYNPFMIDVQQWGFTGNLQS

SEQ ID NO: 12548 - protein, 25 aa, synthetic construct
  REGION 1..25: note = Description of Artificial Sequence: Synthetic peptide
RVYSSANNCTFEYVSQPFLMDLEGK

SEQ ID NO: 12549 - protein, 25 aa, synthetic construct
  REGION 1..25: note = Description of Artificial Sequence: Synthetic peptide
GFDYVYNPFMIDVQQWGFTGNLQSN

SEQ ID NO: 12550 - protein, 25 aa, synthetic construct
  REGION 1..25: note = Description of Artificial Sequence: Synthetic peptide
PSASAFFGMSRIGMEVTPSGTWLTY

SEQ ID NO: 12551 - protein, 25 aa, synthetic construct
  REGION 1..25: note = Description of Artificial Sequence: Synthetic peptide
KFALTCFSTQFAFACPDGVKHVYQL

SEQ ID NO: 12552 - protein, 25 aa, synthetic construct
  REGION 1..25: note = Description of Artificial Sequence: Synthetic peptide
FALTCFSTQFAFACPDGVKHVYQLR

SEQ ID NO: 12553 - protein, 25 aa, synthetic construct
  REGION 1..25: note = Description of Artificial Sequence: Synthetic peptide
NKFALTCFSTQFAFACPDGVKHVYQ

SEQ ID NO: 12554 - protein, 25 aa, synthetic construct
  REGION 1..25: note = Description of Artificial Sequence: Synthetic peptide
IGDPAQLPAPRTLLTKGTLEPEYFN

SEQ ID NO: 12555 - protein, 25 aa, synthetic construct
  REGION 1..25: note = Description of Artificial Sequence: Synthetic peptide
GDPAQLPAPRTLLTKGTLEPEYFNS

SEQ ID NO: 12556 - protein, 25 aa, synthetic construct
  REGION 1..25: note = Description of Artificial Sequence: Synthetic peptide
YIGDPAQLPAPRTLLTKGTLEPEYF

SEQ ID NO: 12557 - protein, 25 aa, synthetic construct
  REGION 1..25: note = Description of Artificial Sequence: Synthetic peptide
DPAQLPAPRTLLTKGTLEPEYFNSV

SEQ ID NO: 12558 - protein, 25 aa, synthetic construct
  REGION 1..25: note = Description of Artificial Sequence: Synthetic peptide
WESGVKDCVVLHSYFTSDYYQLYST

SEQ ID NO: 12559 - protein, 25 aa, synthetic construct
  REGION 1..25: note = Description of Artificial Sequence: Synthetic peptide
EKWESGVKDCVVLHSYFTSDYYQLY

SEQ ID NO: 12560 - protein, 25 aa, synthetic construct
  REGION 1..25: note = Description of Artificial Sequence: Synthetic peptide
KWESGVKDCVVLHSYFTSDYYQLYS

SEQ ID NO: 12561 - protein, 25 aa, synthetic construct
  REGION 1..25: note = Description of Artificial Sequence: Synthetic peptide
SVFNICQAVTANVNALLSTDGNKIA

SEQ ID NO: 12562 - protein, 25 aa, synthetic construct
  REGION 1..25: note = Description of Artificial Sequence: Synthetic peptide
PQIAQFAPSASAFFGMSRIGMEVTP

SEQ ID NO: 12563 - protein, 25 aa, synthetic construct
  REGION 1..25: note = Description of Artificial Sequence: Synthetic peptide
WPQIAQFAPSASAFFGMSRIGMEVT

SEQ ID NO: 12564 - protein, 25 aa, synthetic construct
  REGION 1..25: note = Description of Artificial Sequence: Synthetic peptide
NKTTLPVNVAFELWAKRNIKPVPEV

SEQ ID NO: 12565 - protein, 25 aa, synthetic construct
  REGION 1..25: note = Description of Artificial Sequence: Synthetic peptide
ENKTTLPVNVAFELWAKRNIKPVPE

SEQ ID NO: 12566 - protein, 25 aa, synthetic construct
  REGION 1..25: note = Description of Artificial Sequence: Synthetic peptide
HFRELGVVHNQDVNLHSSRLSFKEL

SEQ ID NO: 12567 - protein, 25 aa, synthetic construct
  REGION 1..25: note = Description of Artificial Sequence: Synthetic peptide
NTNSSPDDQIGYYRRATRRIRGGDG

SEQ ID NO: 12568 - protein, 25 aa, synthetic construct
  REGION 1..25: note = Description of Artificial Sequence: Synthetic peptide
NSSPDDQIGYYRRATRRIRGGDGKM

SEQ ID NO: 12569 - protein, 25 aa, synthetic construct
  REGION 1..25: note = Description of Artificial Sequence: Synthetic peptide
TNSSPDDQIGYYRRATRRIRGGDGK

SEQ ID NO: 12570 - protein, 25 aa, synthetic construct
  REGION 1..25: note = Description of Artificial Sequence: Synthetic peptide
SSPDDQIGYYRRATRRIRGGDGKMK

SEQ ID NO: 12571 - protein, 25 aa, synthetic construct
  REGION 1..25: note = Description of Artificial Sequence: Synthetic peptide
DKRTTCFSVAALTNNVAFQTVKPGN

SEQ ID NO: 12572 - protein, 25 aa, synthetic construct
  REGION 1..25: note = Description of Artificial Sequence: Synthetic peptide
WKFYDAQPCSDKAYKIEELFYSYAT

SEQ ID NO: 12573 - protein, 25 aa, synthetic construct
  REGION 1..25: note = Description of Artificial Sequence: Synthetic peptide
FYDAQPCSDKAYKIEELFYSYATHS

SEQ ID NO: 12574 - protein, 25 aa, synthetic construct
  REGION 1..25: note = Description of Artificial Sequence: Synthetic peptide
YDAQPCSDKAYKIEELFYSYATHSD

SEQ ID NO: 12575 - protein, 25 aa, synthetic construct
  REGION 1..25: note = Description of Artificial Sequence: Synthetic peptide
KFYDAQPCSDKAYKIEELFYSYATH

SEQ ID NO: 12576 - protein, 25 aa, synthetic construct
  REGION 1..25: note = Description of Artificial Sequence: Synthetic peptide
EWKFYDAQPCSDKAYKIEELFYSYA

SEQ ID NO: 12577 - protein, 25 aa, synthetic construct
  REGION 1..25: note = Description of Artificial Sequence: Synthetic peptide
YTKRNVIPTITQMNLKYAISAKNRA

SEQ ID NO: 12578 - protein, 25 aa, synthetic construct
  REGION 1..25: note = Description of Artificial Sequence: Synthetic peptide
QTGKIADYNYKLPDDFTGCVIAWNS

SEQ ID NO: 12579 - protein, 25 aa, synthetic construct
  REGION 1..25: note = Description of Artificial Sequence: Synthetic peptide
GQTGKIADYNYKLPDDFTGCVIAWN

SEQ ID NO: 12580 - protein, 25 aa, synthetic construct
  REGION 1..25: note = Description of Artificial Sequence: Synthetic peptide
GVYFASTEKSNIIRGWIFGTTLDSK

SEQ ID NO: 12581 - protein, 25 aa, synthetic construct
  REGION 1..25: note = Description of Artificial Sequence: Synthetic peptide
NLKQLPFFYYSDSPCESHGKQVVSD

SEQ ID NO: 12582 - protein, 25 aa, synthetic construct
  REGION 1..25: note = Description of Artificial Sequence: Synthetic peptide
LKQLPFFYYSDSPCESHGKQVVSDI

SEQ ID NO: 12583 - protein, 25 aa, synthetic construct
  REGION 1..25: note = Description of Artificial Sequence: Synthetic peptide
FVNLKQLPFFYYSDSPCESHGKQVV

SEQ ID NO: 12584 - protein, 25 aa, synthetic construct
  REGION 1..25: note = Description of Artificial Sequence: Synthetic peptide
VNLKQLPFFYYSDSPCESHGKQVVS

SEQ ID NO: 12585 - protein, 25 aa, synthetic construct
  REGION 1..25: note = Description of Artificial Sequence: Synthetic peptide
AFVNLKQLPFFYYSDSPCESHGKQV

SEQ ID NO: 12586 - protein, 25 aa, synthetic construct
  REGION 1..25: note = Description of Artificial Sequence: Synthetic peptide
LRKHFSMMILSDDAVVCFNSTYASQ

SEQ ID NO: 12587 - protein, 25 aa, synthetic construct
  REGION 1..25: note = Description of Artificial Sequence: Synthetic peptide
YAYLRKHFSMMILSDDAVVCFNSTY

SEQ ID NO: 12588 - protein, 25 aa, synthetic construct
  REGION 1..25: note = Description of Artificial Sequence: Synthetic peptide
YLRKHFSMMILSDDAVVCFNSTYAS

SEQ ID NO: 12589 - protein, 25 aa, synthetic construct
  REGION 1..25: note = Description of Artificial Sequence: Synthetic peptide
FYAYLRKHFSMMILSDDAVVCFNST

SEQ ID NO: 12590 - protein, 25 aa, synthetic construct
  REGION 1..25: note = Description of Artificial Sequence: Synthetic peptide
AYLRKHFSMMILSDDAVVCFNSTYA

SEQ ID NO: 12591 - protein, 25 aa, synthetic construct
  REGION 1..25: note = Description of Artificial Sequence: Synthetic peptide
LSDRELHLSWEVGKPRPPLNRNYVF

SEQ ID NO: 12592 - protein, 25 aa, synthetic construct
  REGION 1..25: note = Description of Artificial Sequence: Synthetic peptide
SDRELHLSWEVGKPRPPLNRNYVFT

SEQ ID NO: 12593 - protein, 25 aa, synthetic construct
  REGION 1..25: note = Description of Artificial Sequence: Synthetic peptide
DALFAYTKRNVIPTITQMNLKYAIS

SEQ ID NO: 12594 - protein, 25 aa, synthetic construct
  REGION 1..25: note = Description of Artificial Sequence: Synthetic peptide
LQSLQTYVTQQLIRAAEIRASANLA

SEQ ID NO: 12595 - protein, 25 aa, synthetic construct
  REGION 1..25: note = Description of Artificial Sequence: Synthetic peptide
GRLQSLQTYVTQQLIRAAEIRASAN

SEQ ID NO: 12596 - protein, 25 aa, synthetic construct
  REGION 1..25: note = Description of Artificial Sequence: Synthetic peptide
RLQSLQTYVTQQLIRAAEIRASANL

SEQ ID NO: 12597 - protein, 25 aa, synthetic construct
  REGION 1..25: note = Description of Artificial Sequence: Synthetic peptide
LPQGTTLPKGFYAEGSRGGSQASSR

SEQ ID NO: 12598 - protein, 25 aa, synthetic construct
  REGION 1..25: note = Description of Artificial Sequence: Synthetic peptide
QLPQGTTLPKGFYAEGSRGGSQASS

SEQ ID NO: 12599 - protein, 25 aa, synthetic construct
  REGION 1..25: note = Description of Artificial Sequence: Synthetic peptide
PQGTTLPKGFYAEGSRGGSQASSRS

SEQ ID NO: 12600 - protein, 25 aa, synthetic construct
  REGION 1..25: note = Description of Artificial Sequence: Synthetic peptide
QGTTLPKGFYAEGSRGGSQASSRSS

SEQ ID NO: 12601 - protein, 25 aa, synthetic construct
  REGION 1..25: note = Description of Artificial Sequence: Synthetic peptide
PFLGVYYHKNNKSWMESEFRVYSSA

SEQ ID NO: 12602 - protein, 25 aa, synthetic construct
  REGION 1..25: note = Description of Artificial Sequence: Synthetic peptide
DGYVMHANYIFWRNTNPIQLSSYSL

SEQ ID NO: 12603 - protein, 25 aa, synthetic construct
  REGION 1..25: note = Description of Artificial Sequence: Synthetic peptide
MHANYIFWRNTNPIQLSSYSLFDMS

SEQ ID NO: 12604 - protein, 25 aa, synthetic construct
  REGION 1..25: note = Description of Artificial Sequence: Synthetic peptide
GYVMHANYIFWRNTNPIQLSSYSLF

SEQ ID NO: 12605 - protein, 25 aa, synthetic construct
  REGION 1..25: note = Description of Artificial Sequence: Synthetic peptide
VMHANYIFWRNTNPIQLSSYSLFDM

SEQ ID NO: 12606 - protein, 25 aa, synthetic construct
  REGION 1..25: note = Description of Artificial Sequence: Synthetic peptide
HANYIFWRNTNPIQLSSYSLFDMSK

SEQ ID NO: 12607 - protein, 25 aa, synthetic construct
  REGION 1..25: note = Description of Artificial Sequence: Synthetic peptide
YVMHANYIFWRNTNPIQLSSYSLFD

SEQ ID NO: 12608 - protein, 25 aa, synthetic construct
  REGION 1..25: note = Description of Artificial Sequence: Synthetic peptide
AGLEAPFLYLYALVYFLQSINFVRI

SEQ ID NO: 12609 - protein, 25 aa, synthetic construct
  REGION 1..25: note = Description of Artificial Sequence: Synthetic peptide
AAGLEAPFLYLYALVYFLQSINFVR

SEQ ID NO: 12610 - protein, 25 aa, synthetic construct
  REGION 1..25: note = Description of Artificial Sequence: Synthetic peptide
KLFDRYFKYWDQTYHPNCVNCLDDR

SEQ ID NO: 12611 - protein, 25 aa, synthetic construct
  REGION 1..25: note = Description of Artificial Sequence: Synthetic peptide
FDRYFKYWDQTYHPNCVNCLDDRCI

SEQ ID NO: 12612 - protein, 25 aa, synthetic construct
  REGION 1..25: note = Description of Artificial Sequence: Synthetic peptide
WDQTYHPNCVNCLDDRCILHCANFN

SEQ ID NO: 12613 - protein, 25 aa, synthetic construct
  REGION 1..25: note = Description of Artificial Sequence: Synthetic peptide
KYWDQTYHPNCVNCLDDRCILHCAN

SEQ ID NO: 12614 - protein, 25 aa, synthetic construct
  REGION 1..25: note = Description of Artificial Sequence: Synthetic peptide
RYFKYWDQTYHPNCVNCLDDRCILH

SEQ ID NO: 12615 - protein, 25 aa, synthetic construct
  REGION 1..25: note = Description of Artificial Sequence: Synthetic peptide
YWDQTYHPNCVNCLDDRCILHCANF

SEQ ID NO: 12616 - protein, 25 aa, synthetic construct
  REGION 1..25: note = Description of Artificial Sequence: Synthetic peptide
LFDRYFKYWDQTYHPNCVNCLDDRC

SEQ ID NO: 12617 - protein, 25 aa, synthetic construct
  REGION 1..25: note = Description of Artificial Sequence: Synthetic peptide
FKYWDQTYHPNCVNCLDDRCILHCA

SEQ ID NO: 12618 - protein, 25 aa, synthetic construct
  REGION 1..25: note = Description of Artificial Sequence: Synthetic peptide
YFKYWDQTYHPNCVNCLDDRCILHC

SEQ ID NO: 12619 - protein, 25 aa, synthetic construct
  REGION 1..25: note = Description of Artificial Sequence: Synthetic peptide
DRYFKYWDQTYHPNCVNCLDDRCIL

SEQ ID NO: 12620 - protein, 25 aa, synthetic construct
  REGION 1..25: note = Description of Artificial Sequence: Synthetic peptide
TVKPGNFNKDFYDFAVSKGFFKEGS

SEQ ID NO: 12621 - protein, 25 aa, synthetic construct
  REGION 1..25: note = Description of Artificial Sequence: Synthetic peptide
AFQTVKPGNFNKDFYDFAVSKGFFK

SEQ ID NO: 12622 - protein, 25 aa, synthetic construct
  REGION 1..25: note = Description of Artificial Sequence: Synthetic peptide
VKPGNFNKDFYDFAVSKGFFKEGSS

SEQ ID NO: 12623 - protein, 25 aa, synthetic construct
  REGION 1..25: note = Description of Artificial Sequence: Synthetic peptide
FQTVKPGNFNKDFYDFAVSKGFFKE

SEQ ID NO: 12624 - protein, 25 aa, synthetic construct
  REGION 1..25: note = Description of Artificial Sequence: Synthetic peptide
QTVKPGNFNKDFYDFAVSKGFFKEG

SEQ ID NO: 12625 - protein, 25 aa, synthetic construct
  REGION 1..25: note = Description of Artificial Sequence: Synthetic peptide
AISAKNRARTVAGVSICSTMTNRQF

SEQ ID NO: 12626 - protein, 25 aa, synthetic construct
  REGION 1..25: note = Description of Artificial Sequence: Synthetic peptide
EFRVYSSANNCTFEYVSQPFLMDLE

SEQ ID NO: 12627 - protein, 25 aa, synthetic construct
  REGION 1..25: note = Description of Artificial Sequence: Synthetic peptide
NLIIKNLSKSLTENKYSQLDEEQPM

SEQ ID NO: 12628 - protein, 25 aa, synthetic construct
  REGION 1..25: note = Description of Artificial Sequence: Synthetic peptide
DLLFNKVTLADAGFIKQYGDCLGDI

SEQ ID NO: 12629 - protein, 25 aa, synthetic construct
  REGION 1..25: note = Description of Artificial Sequence: Synthetic peptide
KQGNFKNLREFVFKNIDGYFKIYSK

SEQ ID NO: 12630 - protein, 25 aa, synthetic construct
  REGION 1..25: note = Description of Artificial Sequence: Synthetic peptide
PFLMDLEGKQGNFKNLREFVFKNID

SEQ ID NO: 12631 - protein, 25 aa, synthetic construct
  REGION 1..25: note = Description of Artificial Sequence: Synthetic peptide
QPFLMDLEGKQGNFKNLREFVFKNI

SEQ ID NO: 12632 - protein, 25 aa, synthetic construct
  REGION 1..25: note = Description of Artificial Sequence: Synthetic peptide
GKQGNFKNLREFVFKNIDGYFKIYS

SEQ ID NO: 12633 - protein, 25 aa, synthetic construct
  REGION 1..25: note = Description of Artificial Sequence: Synthetic peptide
TNSPRRARSVASQSIIAYTMSLGAE

SEQ ID NO: 12634 - protein, 25 aa, synthetic construct
  REGION 1..25: note = Description of Artificial Sequence: Synthetic peptide
PYNSVTSSIVITSGDGTTSPISEHD

SEQ ID NO: 12635 - protein, 25 aa, synthetic construct
  REGION 1..25: note = Description of Artificial Sequence: Synthetic peptide
ECLYRNRDVDTDFVNEFYAYLRKHF

SEQ ID NO: 12636 - protein, 25 aa, synthetic construct
  REGION 1..25: note = Description of Artificial Sequence: Synthetic peptide
YECLYRNRDVDTDFVNEFYAYLRKH

SEQ ID NO: 12637 - protein, 25 aa, synthetic construct
  REGION 1..25: note = Description of Artificial Sequence: Synthetic peptide
PTWRVYSTGSNVFQTRAGCLIGAEH

SEQ ID NO: 12638 - protein, 25 aa, synthetic construct
  REGION 1..25: note = Description of Artificial Sequence: Synthetic peptide
IAWNSNNLDSKVGGNYNYLYRLFRK

SEQ ID NO: 12639 - protein, 25 aa, synthetic construct
  REGION 1..25: note = Description of Artificial Sequence: Synthetic peptide
TSTDVVYRAFDIYNDKVAGFAKFLK

SEQ ID NO: 12640 - protein, 25 aa, synthetic construct
  REGION 1..25: note = Description of Artificial Sequence: Synthetic peptide
MLRIMASLVLARKHTTCCSLSHRFY

SEQ ID NO: 12641 - protein, 25 aa, synthetic construct
  REGION 1..25: note = Description of Artificial Sequence: Synthetic peptide
NMLRIMASLVLARKHTTCCSLSHRF

SEQ ID NO: 12642 - protein, 25 aa, synthetic construct
  REGION 1..25: note = Description of Artificial Sequence: Synthetic peptide
EASKKPRQKRTATKAYNVTQAFGRR

SEQ ID NO: 12643 - protein, 25 aa, synthetic construct
  REGION 1..25: note = Description of Artificial Sequence: Synthetic peptide
AEASKKPRQKRTATKAYNVTQAFGR

SEQ ID NO: 12644 - protein, 25 aa, synthetic construct
  REGION 1..25: note = Description of Artificial Sequence: Synthetic peptide
PIDKCSRIIPARARVECFDKFKVNS

SEQ ID NO: 12645 - protein, 25 aa, synthetic construct
  REGION 1..25: note = Description of Artificial Sequence: Synthetic peptide
EPEFYEAMYTPHTVLQAVGACVLCN

SEQ ID NO: 12646 - protein, 25 aa, synthetic construct
  REGION 1..25: note = Description of Artificial Sequence: Synthetic peptide
NDNTSRYWEPEFYEAMYTPHTVLQA

SEQ ID NO: 12647 - protein, 25 aa, synthetic construct
  REGION 1..25: note = Description of Artificial Sequence: Synthetic peptide
TNDNTSRYWEPEFYEAMYTPHTVLQ

SEQ ID NO: 12648 - protein, 25 aa, synthetic construct
  REGION 1..25: note = Description of Artificial Sequence: Synthetic peptide
WEPEFYEAMYTPHTVLQAVGACVLC

SEQ ID NO: 12649 - protein, 25 aa, synthetic construct
  REGION 1..25: note = Description of Artificial Sequence: Synthetic peptide
CQAVTANVNALLSTDGNKIADKYVR

SEQ ID NO: 12650 - protein, 25 aa, synthetic construct
  REGION 1..25: note = Description of Artificial Sequence: Synthetic peptide
FWNCNVDRYPANSIVCRFDTRVLSN

SEQ ID NO: 12651 - protein, 25 aa, synthetic construct
  REGION 1..25: note = Description of Artificial Sequence: Synthetic peptide
WNCNVDRYPANSIVCRFDTRVLSNL

SEQ ID NO: 12652 - protein, 25 aa, synthetic construct
  REGION 1..25: note = Description of Artificial Sequence: Synthetic peptide
LLLLFVTVYSHLLLVAAGLEAPFLY

SEQ ID NO: 12653 - protein, 25 aa, synthetic construct
  REGION 1..25: note = Description of Artificial Sequence: Synthetic peptide
LLLFVTVYSHLLLVAAGLEAPFLYL

SEQ ID NO: 12654 - protein, 25 aa, synthetic construct
  REGION 1..25: note = Description of Artificial Sequence: Synthetic peptide
DNKLKAHKDKSAQCFKMFYKGVITH

SEQ ID NO: 12655 - protein, 25 aa, synthetic construct
  REGION 1..25: note = Description of Artificial Sequence: Synthetic peptide
NKLKAHKDKSAQCFKMFYKGVITHD

SEQ ID NO: 12656 - protein, 25 aa, synthetic construct
  REGION 1..25: note = Description of Artificial Sequence: Synthetic peptide
ELTSMKYFVKIGPERTCCLCDRRAT

SEQ ID NO: 12657 - protein, 25 aa, synthetic construct
  REGION 1..25: note = Description of Artificial Sequence: Synthetic peptide
AHGFELTSMKYFVKIGPERTCCLCD

SEQ ID NO: 12658 - protein, 25 aa, synthetic construct
  REGION 1..25: note = Description of Artificial Sequence: Synthetic peptide
VLWAHGFELTSMKYFVKIGPERTCC

SEQ ID NO: 12659 - protein, 25 aa, synthetic construct
  REGION 1..25: note = Description of Artificial Sequence: Synthetic peptide
TSMKYFVKIGPERTCCLCDRRATCF

SEQ ID NO: 12660 - protein, 25 aa, synthetic construct
  REGION 1..25: note = Description of Artificial Sequence: Synthetic peptide
HGFELTSMKYFVKIGPERTCCLCDR

SEQ ID NO: 12661 - protein, 25 aa, synthetic construct
  REGION 1..25: note = Description of Artificial Sequence: Synthetic peptide
LWAHGFELTSMKYFVKIGPERTCCL

SEQ ID NO: 12662 - protein, 25 aa, synthetic construct
  REGION 1..25: note = Description of Artificial Sequence: Synthetic peptide
GFELTSMKYFVKIGPERTCCLCDRR

SEQ ID NO: 12663 - protein, 25 aa, synthetic construct
  REGION 1..25: note = Description of Artificial Sequence: Synthetic peptide
FVLWAHGFELTSMKYFVKIGPERTC

SEQ ID NO: 12664 - protein, 25 aa, synthetic construct
  REGION 1..25: note = Description of Artificial Sequence: Synthetic peptide
FELTSMKYFVKIGPERTCCLCDRRA

SEQ ID NO: 12665 - protein, 25 aa, synthetic construct
  REGION 1..25: note = Description of Artificial Sequence: Synthetic peptide
WAHGFELTSMKYFVKIGPERTCCLC

SEQ ID NO: 12666 - protein, 25 aa, synthetic construct
  REGION 1..25: note = Description of Artificial Sequence: Synthetic peptide
VFVLWAHGFELTSMKYFVKIGPERT

SEQ ID NO: 12667 - protein, 25 aa, synthetic construct
  REGION 1..25: note = Description of Artificial Sequence: Synthetic peptide
LTSMKYFVKIGPERTCCLCDRRATC

SEQ ID NO: 12668 - protein, 25 aa, synthetic construct
  REGION 1..25: note = Description of Artificial Sequence: Synthetic peptide
LQHRLYECLYRNRDVDTDFVNEFYA

SEQ ID NO: 12669 - protein, 25 aa, synthetic construct
  REGION 1..25: note = Description of Artificial Sequence: Synthetic peptide
SSQCVNLTTRTQLPPAYTNSFTRGV

SEQ ID NO: 12670 - protein, 25 aa, synthetic construct
  REGION 1..25: note = Description of Artificial Sequence: Synthetic peptide
LVSSQCVNLTTRTQLPPAYTNSFTR

SEQ ID NO: 12671 - protein, 25 aa, synthetic construct
  REGION 1..25: note = Description of Artificial Sequence: Synthetic peptide
VSSQCVNLTTRTQLPPAYTNSFTRG

SEQ ID NO: 12672 - protein, 25 aa, synthetic construct
  REGION 1..25: note = Description of Artificial Sequence: Synthetic peptide
VAFQTVKPGNFNKDFYDFAVSKGFF

SEQ ID NO: 12673 - protein, 25 aa, synthetic construct
  REGION 1..25: note = Description of Artificial Sequence: Synthetic peptide
LGVYYHKNNKSWMESEFRVYSSANN

SEQ ID NO: 12674 - protein, 25 aa, synthetic construct
  REGION 1..25: note = Description of Artificial Sequence: Synthetic peptide
SSQAWQPGVAMPNLYKMQRMLLEKC

SEQ ID NO: 12675 - protein, 25 aa, synthetic construct
  REGION 1..25: note = Description of Artificial Sequence: Synthetic peptide
YVFCTVNALPETTADIVVFDEISMA

SEQ ID NO: 12676 - protein, 25 aa, synthetic construct
  REGION 1..25: note = Description of Artificial Sequence: Synthetic peptide
MHAASGNLLLDKRTTCFSVAALTNN

SEQ ID NO: 12677 - protein, 25 aa, synthetic construct
  REGION 1..25: note = Description of Artificial Sequence: Synthetic peptide
AMHAASGNLLLDKRTTCFSVAALTN

SEQ ID NO: 12678 - protein, 25 aa, synthetic construct
  REGION 1..25: note = Description of Artificial Sequence: Synthetic peptide
HAASGNLLLDKRTTCFSVAALTNNV

SEQ ID NO: 12679 - protein, 25 aa, synthetic construct
  REGION 1..25: note = Description of Artificial Sequence: Synthetic peptide
SVCRLMKTIGPDMFLGTCRRCPAEI

SEQ ID NO: 12680 - protein, 25 aa, synthetic construct
  REGION 1..25: note = Description of Artificial Sequence: Synthetic peptide
SYECDIPIGAGICASYQTQTNSPRR

SEQ ID NO: 12681 - protein, 25 aa, synthetic construct
  REGION 1..25: note = Description of Artificial Sequence: Synthetic peptide
SQCVNLTTRTQLPPAYTNSFTRGVY

SEQ ID NO: 12682 - protein, 25 aa, synthetic construct
  REGION 1..25: note = Description of Artificial Sequence: Synthetic peptide
VYDNKLKAHKDKSAQCFKMFYKGVI

SEQ ID NO: 12683 - protein, 25 aa, synthetic construct
  REGION 1..25: note = Description of Artificial Sequence: Synthetic peptide
HRFYRLANECAQVLSEMVMCGGSLY

SEQ ID NO: 12684 - protein, 25 aa, synthetic construct
  REGION 1..25: note = Description of Artificial Sequence: Synthetic peptide
LKYAISAKNRARTVAGVSICSTMTN

SEQ ID NO: 12685 - protein, 25 aa, synthetic construct
  REGION 1..25: note = Description of Artificial Sequence: Synthetic peptide
NLKYAISAKNRARTVAGVSICSTMT

SEQ ID NO: 12686 - protein, 25 aa, synthetic construct
  REGION 1..25: note = Description of Artificial Sequence: Synthetic peptide
VKQIYKTPPIKDFGGFNFSQILPDP

SEQ ID NO: 12687 - protein, 25 aa, synthetic construct
  REGION 1..25: note = Description of Artificial Sequence: Synthetic peptide
VDLFRNARNGVLITEGSVKGLQPSV

SEQ ID NO: 12688 - protein, 25 aa, synthetic construct
  REGION 1..25: note = Description of Artificial Sequence: Synthetic peptide
QVDLFRNARNGVLITEGSVKGLQPS

SEQ ID NO: 12689 - protein, 25 aa, synthetic construct
  REGION 1..25: note = Description of Artificial Sequence: Synthetic peptide
FNVLFSTVFPPTSFGPLVRKIFVDG

SEQ ID NO: 12690 - protein, 25 aa, synthetic construct
  REGION 1..25: note = Description of Artificial Sequence: Synthetic peptide
ASAFFGMSRIGMEVTPSGTWLTYTG

SEQ ID NO: 12691 - protein, 25 aa, synthetic construct
  REGION 1..25: note = Description of Artificial Sequence: Synthetic peptide
AFFGMSRIGMEVTPSGTWLTYTGAI

SEQ ID NO: 12692 - protein, 25 aa, synthetic construct
  REGION 1..25: note = Description of Artificial Sequence: Synthetic peptide
SAFFGMSRIGMEVTPSGTWLTYTGA

SEQ ID NO: 12693 - protein, 25 aa, synthetic construct
  REGION 1..25: note = Description of Artificial Sequence: Synthetic peptide
FFGMSRIGMEVTPSGTWLTYTGAIK

SEQ ID NO: 12694 - protein, 25 aa, synthetic construct
  REGION 1..25: note = Description of Artificial Sequence: Synthetic peptide
DKCSRIIPARARVECFDKFKVNSTL

SEQ ID NO: 12695 - protein, 25 aa, synthetic construct
  REGION 1..25: note = Description of Artificial Sequence: Synthetic peptide
YANSVFNICQAVTANVNALLSTDGN

SEQ ID NO: 12696 - protein, 25 aa, synthetic construct
  REGION 1..25: note = Description of Artificial Sequence: Synthetic peptide
ANSVFNICQAVTANVNALLSTDGNK

SEQ ID NO: 12697 - protein, 25 aa, synthetic construct
  REGION 1..25: note = Description of Artificial Sequence: Synthetic peptide
EVRQIAPGQTGKIADYNYKLPDDFT

SEQ ID NO: 12698 - protein, 25 aa, synthetic construct
  REGION 1..25: note = Description of Artificial Sequence: Synthetic peptide
IAPGQTGKIADYNYKLPDDFTGCVI

SEQ ID NO: 12699 - protein, 25 aa, synthetic construct
  REGION 1..25: note = Description of Artificial Sequence: Synthetic peptide
RQIAPGQTGKIADYNYKLPDDFTGC

SEQ ID NO: 12700 - protein, 25 aa, synthetic construct
  REGION 1..25: note = Description of Artificial Sequence: Synthetic peptide
QIAPGQTGKIADYNYKLPDDFTGCV

SEQ ID NO: 12701 - protein, 25 aa, synthetic construct
  REGION 1..25: note = Description of Artificial Sequence: Synthetic peptide
VRQIAPGQTGKIADYNYKLPDDFTG

SEQ ID NO: 12702 - protein, 25 aa, synthetic construct
  REGION 1..25: note = Description of Artificial Sequence: Synthetic peptide
QPYRVVVLSFELLHAPATVCGPKKS

SEQ ID NO: 12703 - protein, 25 aa, synthetic construct
  REGION 1..25: note = Description of Artificial Sequence: Synthetic peptide
RVVVLSFELLHAPATVCGPKKSTNL

SEQ ID NO: 12704 - protein, 25 aa, synthetic construct
  REGION 1..25: note = Description of Artificial Sequence: Synthetic peptide
PYRVVVLSFELLHAPATVCGPKKST

SEQ ID NO: 12705 - protein, 25 aa, synthetic construct
  REGION 1..25: note = Description of Artificial Sequence: Synthetic peptide
YQPYRVVVLSFELLHAPATVCGPKK

SEQ ID NO: 12706 - protein, 25 aa, synthetic construct
  REGION 1..25: note = Description of Artificial Sequence: Synthetic peptide
YRVVVLSFELLHAPATVCGPKKSTN

SEQ ID NO: 12707 - protein, 25 aa, synthetic construct
  REGION 1..25: note = Description of Artificial Sequence: Synthetic peptide
VVVLSFELLHAPATVCGPKKSTNLV

SEQ ID NO: 12708 - protein, 25 aa, synthetic construct
  REGION 1..25: note = Description of Artificial Sequence: Synthetic peptide
MKTIGPDMFLGTCRRCPAEIVDTVS

SEQ ID NO: 12709 - protein, 25 aa, synthetic construct
  REGION 1..25: note = Description of Artificial Sequence: Synthetic peptide
TIGPDMFLGTCRRCPAEIVDTVSAL

SEQ ID NO: 12710 - protein, 25 aa, synthetic construct
  REGION 1..25: note = Description of Artificial Sequence: Synthetic peptide
RLMKTIGPDMFLGTCRRCPAEIVDT

SEQ ID NO: 12711 - protein, 25 aa, synthetic construct
  REGION 1..25: note = Description of Artificial Sequence: Synthetic peptide
KTIGPDMFLGTCRRCPAEIVDTVSA

SEQ ID NO: 12712 - protein, 25 aa, synthetic construct
  REGION 1..25: note = Description of Artificial Sequence: Synthetic peptide
LMKTIGPDMFLGTCRRCPAEIVDTV

SEQ ID NO: 12713 - protein, 25 aa, synthetic construct
  REGION 1..25: note = Description of Artificial Sequence: Synthetic peptide
IGPDMFLGTCRRCPAEIVDTVSALV

SEQ ID NO: 12714 - protein, 25 aa, synthetic construct
  REGION 1..25: note = Description of Artificial Sequence: Synthetic peptide
GQVFGLYKNTCVGSDNVTDFNAIAT

SEQ ID NO: 12715 - protein, 25 aa, synthetic construct
  REGION 1..25: note = Description of Artificial Sequence: Synthetic peptide
VFGLYKNTCVGSDNVTDFNAIATCD

SEQ ID NO: 12716 - protein, 25 aa, synthetic construct
  REGION 1..25: note = Description of Artificial Sequence: Synthetic peptide
NGQVFGLYKNTCVGSDNVTDFNAIA

SEQ ID NO: 12717 - protein, 25 aa, synthetic construct
  REGION 1..25: note = Description of Artificial Sequence: Synthetic peptide
QVFGLYKNTCVGSDNVTDFNAIATC

SEQ ID NO: 12718 - protein, 25 aa, synthetic construct
  REGION 1..25: note = Description of Artificial Sequence: Synthetic peptide
VLSFELLHAPATVCGPKKSTNLVKN

SEQ ID NO: 12719 - protein, 25 aa, synthetic construct
  REGION 1..25: note = Description of Artificial Sequence: Synthetic peptide
SPYNSQNAVASKILGLPTQTVDSSQ

SEQ ID NO: 12720 - protein, 25 aa, synthetic construct
  REGION 1..25: note = Description of Artificial Sequence: Synthetic peptide
GAVILRGHLRIAGHHLGRCDIKDLP

SEQ ID NO: 12721 - protein, 25 aa, synthetic construct
  REGION 1..25: note = Description of Artificial Sequence: Synthetic peptide
TLPVNVAFELWAKRNIKPVPEVKIL

SEQ ID NO: 12722 - protein, 25 aa, synthetic construct
  REGION 1..25: note = Description of Artificial Sequence: Synthetic peptide
PVNVAFELWAKRNIKPVPEVKILNN

SEQ ID NO: 12723 - protein, 25 aa, synthetic construct
  REGION 1..25: note = Description of Artificial Sequence: Synthetic peptide
LPVNVAFELWAKRNIKPVPEVKILN

SEQ ID NO: 12724 - protein, 25 aa, synthetic construct
  REGION 1..25: note = Description of Artificial Sequence: Synthetic peptide
VNFNFNGLTGTGVLTESNKKFLPFQ

SEQ ID NO: 12725 - protein, 25 aa, synthetic construct
  REGION 1..25: note = Description of Artificial Sequence: Synthetic peptide
CLVGLMWLSYFIASFRLFARTRSMW

SEQ ID NO: 12726 - protein, 25 aa, synthetic construct
  REGION 1..25: note = Description of Artificial Sequence: Synthetic peptide
ACLVGLMWLSYFIASFRLFARTRSM

SEQ ID NO: 12727 - protein, 25 aa, synthetic construct
  REGION 1..25: note = Description of Artificial Sequence: Synthetic peptide
AARDLICAQKFNGLTVLPPLLTDEM

SEQ ID NO: 12728 - protein, 25 aa, synthetic construct
  REGION 1..25: note = Description of Artificial Sequence: Synthetic peptide
GATVVIGTSKFYGGWHNMLKTVYSD

SEQ ID NO: 12729 - protein, 25 aa, synthetic construct
  REGION 1..25: note = Description of Artificial Sequence: Synthetic peptide
RGATVVIGTSKFYGGWHNMLKTVYS

SEQ ID NO: 12730 - protein, 25 aa, synthetic construct
  REGION 1..25: note = Description of Artificial Sequence: Synthetic peptide
NEFYAYLRKHFSMMILSDDAVVCFN

SEQ ID NO: 12731 - protein, 25 aa, synthetic construct
  REGION 1..25: note = Description of Artificial Sequence: Synthetic peptide
NKCVNFNFNGLTGTGVLTESNKKFL

SEQ ID NO: 12732 - protein, 25 aa, synthetic construct
  REGION 1..25: note = Description of Artificial Sequence: Synthetic peptide
KNKCVNFNFNGLTGTGVLTESNKKF

SEQ ID NO: 12733 - protein, 25 aa, synthetic construct
  REGION 1..25: note = Description of Artificial Sequence: Synthetic peptide
KCVNFNFNGLTGTGVLTESNKKFLP

SEQ ID NO: 12734 - protein, 25 aa, synthetic construct
  REGION 1..25: note = Description of Artificial Sequence: Synthetic peptide
VKNKCVNFNFNGLTGTGVLTESNKK

SEQ ID NO: 12735 - protein, 25 aa, synthetic construct
  REGION 1..25: note = Description of Artificial Sequence: Synthetic peptide
SFVIRGDEVRQIAPGQTGKIADYNY

SEQ ID NO: 12736 - protein, 25 aa, synthetic construct
  REGION 1..25: note = Description of Artificial Sequence: Synthetic peptide
DSFVIRGDEVRQIAPGQTGKIADYN

SEQ ID NO: 12737 - protein, 25 aa, synthetic construct
  REGION 1..25: note = Description of Artificial Sequence: Synthetic peptide
LAMDEFIERYKLEGYAFEHIVYGDF

SEQ ID NO: 12738 - protein, 25 aa, synthetic construct
  REGION 1..25: note = Description of Artificial Sequence: Synthetic peptide
EIDFLELAMDEFIERYKLEGYAFEH

SEQ ID NO: 12739 - protein, 25 aa, synthetic construct
  REGION 1..25: note = Description of Artificial Sequence: Synthetic peptide
MEIDFLELAMDEFIERYKLEGYAFE

SEQ ID NO: 12740 - protein, 25 aa, synthetic construct
  REGION 1..25: note = Description of Artificial Sequence: Synthetic peptide
ELAMDEFIERYKLEGYAFEHIVYGD

SEQ ID NO: 12741 - protein, 25 aa, synthetic construct
  REGION 1..25: note = Description of Artificial Sequence: Synthetic peptide
FLELAMDEFIERYKLEGYAFEHIVY

SEQ ID NO: 12742 - protein, 25 aa, synthetic construct
  REGION 1..25: note = Description of Artificial Sequence: Synthetic peptide
IDFLELAMDEFIERYKLEGYAFEHI

SEQ ID NO: 12743 - protein, 25 aa, synthetic construct
  REGION 1..25: note = Description of Artificial Sequence: Synthetic peptide
AMDEFIERYKLEGYAFEHIVYGDFS

SEQ ID NO: 12744 - protein, 25 aa, synthetic construct
  REGION 1..25: note = Description of Artificial Sequence: Synthetic peptide
LELAMDEFIERYKLEGYAFEHIVYG

SEQ ID NO: 12745 - protein, 25 aa, synthetic construct
  REGION 1..25: note = Description of Artificial Sequence: Synthetic peptide
DFLELAMDEFIERYKLEGYAFEHIV

SEQ ID NO: 12746 - protein, 25 aa, synthetic construct
  REGION 1..25: note = Description of Artificial Sequence: Synthetic peptide
MACLVGLMWLSYFIASFRLFARTRS

SEQ ID NO: 12747 - protein, 25 aa, synthetic construct
  REGION 1..25: note = Description of Artificial Sequence: Synthetic peptide
AMACLVGLMWLSYFIASFRLFARTR

SEQ ID NO: 12748 - protein, 25 aa, synthetic construct
  REGION 1..25: note = Description of Artificial Sequence: Synthetic peptide
VVIGIVNNTVYDPLQPELDSFKEEL

SEQ ID NO: 12749 - protein, 25 aa, synthetic construct
  REGION 1..25: note = Description of Artificial Sequence: Synthetic peptide
VIGIVNNTVYDPLQPELDSFKEELD

SEQ ID NO: 12750 - protein, 25 aa, synthetic construct
  REGION 1..25: note = Description of Artificial Sequence: Synthetic peptide
DVVIGIVNNTVYDPLQPELDSFKEE

SEQ ID NO: 12751 - protein, 25 aa, synthetic construct
  REGION 1..25: note = Description of Artificial Sequence: Synthetic peptide
GNCDVVIGIVNNTVYDPLQPELDSF

SEQ ID NO: 12752 - protein, 25 aa, synthetic construct
  REGION 1..25: note = Description of Artificial Sequence: Synthetic peptide
CDVVIGIVNNTVYDPLQPELDSFKE

SEQ ID NO: 12753 - protein, 25 aa, synthetic construct
  REGION 1..25: note = Description of Artificial Sequence: Synthetic peptide
SGNCDVVIGIVNNTVYDPLQPELDS

SEQ ID NO: 12754 - protein, 25 aa, synthetic construct
  REGION 1..25: note = Description of Artificial Sequence: Synthetic peptide
NCDVVIGIVNNTVYDPLQPELDSFK

SEQ ID NO: 12755 - protein, 25 aa, synthetic construct
  REGION 1..25: note = Description of Artificial Sequence: Synthetic peptide
LLDKRTTCFSVAALTNNVAFQTVKP

SEQ ID NO: 12756 - protein, 25 aa, synthetic construct
  REGION 1..25: note = Description of Artificial Sequence: Synthetic peptide
LLLDKRTTCFSVAALTNNVAFQTVK

SEQ ID NO: 12757 - protein, 25 aa, synthetic construct
  REGION 1..25: note = Description of Artificial Sequence: Synthetic peptide
YYKKVDGVVQQLPETYFTQSRNLQE

SEQ ID NO: 12758 - protein, 25 aa, synthetic construct
  REGION 1..25: note = Description of Artificial Sequence: Synthetic peptide
YKKVDGVVQQLPETYFTQSRNLQEF

SEQ ID NO: 12759 - protein, 25 aa, synthetic construct
  REGION 1..25: note = Description of Artificial Sequence: Synthetic peptide
EQDKNTQEVFAQVKQIYKTPPIKDF

SEQ ID NO: 12760 - protein, 25 aa, synthetic construct
  REGION 1..25: note = Description of Artificial Sequence: Synthetic peptide
VEQDKNTQEVFAQVKQIYKTPPIKD

SEQ ID NO: 12761 - protein, 25 aa, synthetic construct
  REGION 1..25: note = Description of Artificial Sequence: Synthetic peptide
AVEQDKNTQEVFAQVKQIYKTPPIK

SEQ ID NO: 12762 - protein, 25 aa, synthetic construct
  REGION 1..25: note = Description of Artificial Sequence: Synthetic peptide
IAVEQDKNTQEVFAQVKQIYKTPPI

SEQ ID NO: 12763 - protein, 25 aa, synthetic construct
  REGION 1..25: note = Description of Artificial Sequence: Synthetic peptide
QDKNTQEVFAQVKQIYKTPPIKDFG

SEQ ID NO: 12764 - protein, 25 aa, synthetic construct
  REGION 1..25: note = Description of Artificial Sequence: Synthetic peptide
KNTQEVFAQVKQIYKTPPIKDFGGF

SEQ ID NO: 12765 - protein, 25 aa, synthetic construct
  REGION 1..25: note = Description of Artificial Sequence: Synthetic peptide
NTQEVFAQVKQIYKTPPIKDFGGFN

SEQ ID NO: 12766 - protein, 25 aa, synthetic construct
  REGION 1..25: note = Description of Artificial Sequence: Synthetic peptide
QPRTFLLKYNENGTITDAVDCALDP

SEQ ID NO: 12767 - protein, 25 aa, synthetic construct
  REGION 1..25: note = Description of Artificial Sequence: Synthetic peptide
ADLVYALRHFDEGNCDTLKEILVTY

SEQ ID NO: 12768 - protein, 25 aa, synthetic construct
  REGION 1..25: note = Description of Artificial Sequence: Synthetic peptide
INRPQIGVVREFLTRNPAWRKAVFI

SEQ ID NO: 12769 - protein, 25 aa, synthetic construct
  REGION 1..25: note = Description of Artificial Sequence: Synthetic peptide
RPQIGVVREFLTRNPAWRKAVFISP

SEQ ID NO: 12770 - protein, 25 aa, synthetic construct
  REGION 1..25: note = Description of Artificial Sequence: Synthetic peptide
NRPQIGVVREFLTRNPAWRKAVFIS

SEQ ID NO: 12771 - protein, 25 aa, synthetic construct
  REGION 1..25: note = Description of Artificial Sequence: Synthetic peptide
SAINRPQIGVVREFLTRNPAWRKAV

SEQ ID NO: 12772 - protein, 25 aa, synthetic construct
  REGION 1..25: note = Description of Artificial Sequence: Synthetic peptide
AINRPQIGVVREFLTRNPAWRKAVF

SEQ ID NO: 12773 - protein, 25 aa, synthetic construct
  REGION 1..25: note = Description of Artificial Sequence: Synthetic peptide
PQIGVVREFLTRNPAWRKAVFISPY

SEQ ID NO: 12774 - protein, 25 aa, synthetic construct
  REGION 1..25: note = Description of Artificial Sequence: Synthetic peptide
SSAINRPQIGVVREFLTRNPAWRKA

SEQ ID NO: 12775 - protein, 25 aa, synthetic construct
  REGION 1..25: note = Description of Artificial Sequence: Synthetic peptide
ANQFNSAIGKIQDSLSSTASALGKL

SEQ ID NO: 12776 - protein, 25 aa, synthetic construct
  REGION 1..25: note = Description of Artificial Sequence: Synthetic peptide
TKHPNQEYADVFHLYLQYIRKLHDE

SEQ ID NO: 12777 - protein, 25 aa, synthetic construct
  REGION 1..25: note = Description of Artificial Sequence: Synthetic peptide
ALALLLLDRLNQLESKMSGKGQQQQ

SEQ ID NO: 12778 - protein, 25 aa, synthetic construct
  REGION 1..25: note = Description of Artificial Sequence: Synthetic peptide
DQDALFAYTKRNVIPTITQMNLKYA

SEQ ID NO: 12779 - protein, 25 aa, synthetic construct
  REGION 1..25: note = Description of Artificial Sequence: Synthetic peptide
VAGDSGFAAYSRYRIGNYKLNTDHS

SEQ ID NO: 12780 - protein, 25 aa, synthetic construct
  REGION 1..25: note = Description of Artificial Sequence: Synthetic peptide
QRVAGDSGFAAYSRYRIGNYKLNTD

SEQ ID NO: 12781 - protein, 25 aa, synthetic construct
  REGION 1..25: note = Description of Artificial Sequence: Synthetic peptide
GASQRVAGDSGFAAYSRYRIGNYKL

SEQ ID NO: 12782 - protein, 25 aa, synthetic construct
  REGION 1..25: note = Description of Artificial Sequence: Synthetic peptide
ASQRVAGDSGFAAYSRYRIGNYKLN

SEQ ID NO: 12783 - protein, 25 aa, synthetic construct
  REGION 1..25: note = Description of Artificial Sequence: Synthetic peptide
RVAGDSGFAAYSRYRIGNYKLNTDH

SEQ ID NO: 12784 - protein, 25 aa, synthetic construct
  REGION 1..25: note = Description of Artificial Sequence: Synthetic peptide
SQRVAGDSGFAAYSRYRIGNYKLNT

SEQ ID NO: 12785 - protein, 25 aa, synthetic construct
  REGION 1..25: note = Description of Artificial Sequence: Synthetic peptide
PETYFTQSRNLQEFKPRSQMEIDFL

SEQ ID NO: 12786 - protein, 25 aa, synthetic construct
  REGION 1..25: note = Description of Artificial Sequence: Synthetic peptide
NVAFELWAKRNIKPVPEVKILNNLG

SEQ ID NO: 12787 - protein, 25 aa, synthetic construct
  REGION 1..25: note = Description of Artificial Sequence: Synthetic peptide
VAFELWAKRNIKPVPEVKILNNLGV

SEQ ID NO: 12788 - protein, 25 aa, synthetic construct
  REGION 1..25: note = Description of Artificial Sequence: Synthetic peptide
NLNESLIDLQELGKYEQYIKWPWYI

SEQ ID NO: 12789 - protein, 25 aa, synthetic construct
  REGION 1..25: note = Description of Artificial Sequence: Synthetic peptide
NESLIDLQELGKYEQYIKWPWYIWL

SEQ ID NO: 12790 - protein, 25 aa, synthetic construct
  REGION 1..25: note = Description of Artificial Sequence: Synthetic peptide
LNESLIDLQELGKYEQYIKWPWYIW

SEQ ID NO: 12791 - protein, 25 aa, synthetic construct
  REGION 1..25: note = Description of Artificial Sequence: Synthetic peptide
VPEVKILNNLGVDIAANTVIWDYKR

SEQ ID NO: 12792 - protein, 25 aa, synthetic construct
  REGION 1..25: note = Description of Artificial Sequence: Synthetic peptide
CELYHYQECVRGTTVLLKEPCSSGT

SEQ ID NO: 12793 - protein, 25 aa, synthetic construct
  REGION 1..25: note = Description of Artificial Sequence: Synthetic peptide
ELYHYQECVRGTTVLLKEPCSSGTY

SEQ ID NO: 12794 - protein, 25 aa, synthetic construct
  REGION 1..25: note = Description of Artificial Sequence: Synthetic peptide
TCELYHYQECVRGTTVLLKEPCSSG

SEQ ID NO: 12795 - protein, 25 aa, synthetic construct
  REGION 1..25: note = Description of Artificial Sequence: Synthetic peptide
ATCELYHYQECVRGTTVLLKEPCSS

SEQ ID NO: 12796 - protein, 25 aa, synthetic construct
  REGION 1..25: note = Description of Artificial Sequence: Synthetic peptide
LSDRVVFVLWAHGFELTSMKYFVKI

SEQ ID NO: 12797 - protein, 25 aa, synthetic construct
  REGION 1..25: note = Description of Artificial Sequence: Synthetic peptide
LKNLSDRVVFVLWAHGFELTSMKYF

SEQ ID NO: 12798 - protein, 25 aa, synthetic construct
  REGION 1..25: note = Description of Artificial Sequence: Synthetic peptide
KNLSDRVVFVLWAHGFELTSMKYFV

SEQ ID NO: 12799 - protein, 25 aa, synthetic construct
  REGION 1..25: note = Description of Artificial Sequence: Synthetic peptide
NLSDRVVFVLWAHGFELTSMKYFVK

SEQ ID NO: 12800 - protein, 25 aa, synthetic construct
  REGION 1..25: note = Description of Artificial Sequence: Synthetic peptide
DTLKNLSDRVVFVLWAHGFELTSMK

SEQ ID NO: 12801 - protein, 25 aa, synthetic construct
  REGION 1..25: note = Description of Artificial Sequence: Synthetic peptide
TLKNLSDRVVFVLWAHGFELTSMKY

SEQ ID NO: 12802 - protein, 25 aa, synthetic construct
  REGION 1..25: note = Description of Artificial Sequence: Synthetic peptide
PLMYKGLPWNVVRIKIVQMLSDTLK

SEQ ID NO: 12803 - protein, 25 aa, synthetic construct
  REGION 1..25: note = Description of Artificial Sequence: Synthetic peptide
GLTGTGVLTESNKKFLPFQQFGRDI

SEQ ID NO: 12804 - protein, 25 aa, synthetic construct
  REGION 1..25: note = Description of Artificial Sequence: Synthetic peptide
LTGTGVLTESNKKFLPFQQFGRDIA

SEQ ID NO: 12805 - protein, 25 aa, synthetic construct
  REGION 1..25: note = Description of Artificial Sequence: Synthetic peptide
TGTGVLTESNKKFLPFQQFGRDIAD

SEQ ID NO: 12806 - protein, 25 aa, synthetic construct
  REGION 1..25: note = Description of Artificial Sequence: Synthetic peptide
RQRLTKYTMADLVYALRHFDEGNCD

SEQ ID NO: 12807 - protein, 25 aa, synthetic construct
  REGION 1..25: note = Description of Artificial Sequence: Synthetic peptide
ISRQRLTKYTMADLVYALRHFDEGN

SEQ ID NO: 12808 - protein, 25 aa, synthetic construct
  REGION 1..25: note = Description of Artificial Sequence: Synthetic peptide
SRQRLTKYTMADLVYALRHFDEGNC

SEQ ID NO: 12809 - protein, 25 aa, synthetic construct
  REGION 1..25: note = Description of Artificial Sequence: Synthetic peptide
NFNGLTGTGVLTESNKKFLPFQQFG

SEQ ID NO: 12810 - protein, 25 aa, synthetic construct
  REGION 1..25: note = Description of Artificial Sequence: Synthetic peptide
NFNFNGLTGTGVLTESNKKFLPFQQ

SEQ ID NO: 12811 - protein, 25 aa, synthetic construct
  REGION 1..25: note = Description of Artificial Sequence: Synthetic peptide
FNFNGLTGTGVLTESNKKFLPFQQF

SEQ ID NO: 12812 - protein, 25 aa, synthetic construct
  REGION 1..25: note = Description of Artificial Sequence: Synthetic peptide
AIRHVRAWIGFDVEGCHATREAVGT

SEQ ID NO: 12813 - protein, 25 aa, synthetic construct
  REGION 1..25: note = Description of Artificial Sequence: Synthetic peptide
EAIRHVRAWIGFDVEGCHATREAVG

SEQ ID NO: 12814 - protein, 25 aa, synthetic construct
  REGION 1..25: note = Description of Artificial Sequence: Synthetic peptide
RHVRAWIGFDVEGCHATREAVGTNL

SEQ ID NO: 12815 - protein, 25 aa, synthetic construct
  REGION 1..25: note = Description of Artificial Sequence: Synthetic peptide
IRHVRAWIGFDVEGCHATREAVGTN

SEQ ID NO: 12816 - protein, 25 aa, synthetic construct
  REGION 1..25: note = Description of Artificial Sequence: Synthetic peptide
GVYYHKNNKSWMESEFRVYSSANNC

SEQ ID NO: 12817 - protein, 25 aa, synthetic construct
  REGION 1..25: note = Description of Artificial Sequence: Synthetic peptide
FTIYSLLLCRMNSRNYIAQVDVVNF

SEQ ID NO: 12818 - protein, 25 aa, synthetic construct
  REGION 1..25: note = Description of Artificial Sequence: Synthetic peptide
IYSLLLCRMNSRNYIAQVDVVNFNL

SEQ ID NO: 12819 - protein, 25 aa, synthetic construct
  REGION 1..25: note = Description of Artificial Sequence: Synthetic peptide
AFPFTIYSLLLCRMNSRNYIAQVDV

SEQ ID NO: 12820 - protein, 25 aa, synthetic construct
  REGION 1..25: note = Description of Artificial Sequence: Synthetic peptide
FPFTIYSLLLCRMNSRNYIAQVDVV

SEQ ID NO: 12821 - protein, 25 aa, synthetic construct
  REGION 1..25: note = Description of Artificial Sequence: Synthetic peptide
PFTIYSLLLCRMNSRNYIAQVDVVN

SEQ ID NO: 12822 - protein, 25 aa, synthetic construct
  REGION 1..25: note = Description of Artificial Sequence: Synthetic peptide
FAFPFTIYSLLLCRMNSRNYIAQVD

SEQ ID NO: 12823 - protein, 25 aa, synthetic construct
  REGION 1..25: note = Description of Artificial Sequence: Synthetic peptide
TIYSLLLCRMNSRNYIAQVDVVNFN

SEQ ID NO: 12824 - protein, 25 aa, synthetic construct
  REGION 1..25: note = Description of Artificial Sequence: Synthetic peptide
VFAFPFTIYSLLLCRMNSRNYIAQV

SEQ ID NO: 12825 - protein, 25 aa, synthetic construct
  REGION 1..25: note = Description of Artificial Sequence: Synthetic peptide
NVFAFPFTIYSLLLCRMNSRNYIAQ

SEQ ID NO: 12826 - protein, 25 aa, synthetic construct
  REGION 1..25: note = Description of Artificial Sequence: Synthetic peptide
VNRFNVAITRAKVGILCIMSDRDLY

SEQ ID NO: 12827 - protein, 25 aa, synthetic construct
  REGION 1..25: note = Description of Artificial Sequence: Synthetic peptide
VITHDVSSAINRPQIGVVREFLTRN

SEQ ID NO: 12828 - protein, 25 aa, synthetic construct
  REGION 1..25: note = Description of Artificial Sequence: Synthetic peptide
AFDKSAFVNLKQLPFFYYSDSPCES

SEQ ID NO: 12829 - protein, 25 aa, synthetic construct
  REGION 1..25: note = Description of Artificial Sequence: Synthetic peptide
FDKSAFVNLKQLPFFYYSDSPCESH

SEQ ID NO: 12830 - protein, 25 aa, synthetic construct
  REGION 1..25: note = Description of Artificial Sequence: Synthetic peptide
HFPREGVFVSNGTHWFVTQRNFYEP

SEQ ID NO: 12831 - protein, 25 aa, synthetic construct
  REGION 1..25: note = Description of Artificial Sequence: Synthetic peptide
AHFPREGVFVSNGTHWFVTQRNFYE

SEQ ID NO: 12832 - protein, 25 aa, synthetic construct
  REGION 1..25: note = Description of Artificial Sequence: Synthetic peptide
SNVANYQKVGMQKYSTLQGPPGTGK

SEQ ID NO: 12833 - protein, 25 aa, synthetic construct
  REGION 1..25: note = Description of Artificial Sequence: Synthetic peptide
NGTKRFDNPVLPFNDGVYFASTEKS

SEQ ID NO: 12834 - protein, 25 aa, synthetic construct
  REGION 1..25: note = Description of Artificial Sequence: Synthetic peptide
LGSLVVRCSFYEDFLEYHDVRVVLD

SEQ ID NO: 12835 - protein, 25 aa, synthetic construct
  REGION 1..25: note = Description of Artificial Sequence: Synthetic peptide
GSLVVRCSFYEDFLEYHDVRVVLDF

SEQ ID NO: 12836 - protein, 25 aa, synthetic construct
  REGION 1..25: note = Description of Artificial Sequence: Synthetic peptide
SLVVRCSFYEDFLEYHDVRVVLDFI

SEQ ID NO: 12837 - protein, 25 aa, synthetic construct
  REGION 1..25: note = Description of Artificial Sequence: Synthetic peptide
VDFQVTIAEILLIIMRTFKVSIWNL

SEQ ID NO: 12838 - protein, 25 aa, synthetic construct
  REGION 1..25: note = Description of Artificial Sequence: Synthetic peptide
VLLPLVSSQCVNLTTRTQLPPAYTN

SEQ ID NO: 12839 - protein, 25 aa, synthetic construct
  REGION 1..25: note = Description of Artificial Sequence: Synthetic peptide
LVLLPLVSSQCVNLTTRTQLPPAYT

SEQ ID NO: 12840 - protein, 25 aa, synthetic construct
  REGION 1..25: note = Description of Artificial Sequence: Synthetic peptide
PYNMRVIHFGAGSDKGVAPGTAVLR

SEQ ID NO: 12841 - protein, 25 aa, synthetic construct
  REGION 1..25: note = Description of Artificial Sequence: Synthetic peptide
LAVPYNMRVIHFGAGSDKGVAPGTA

SEQ ID NO: 12842 - protein, 25 aa, synthetic construct
  REGION 1..25: note = Description of Artificial Sequence: Synthetic peptide
VPYNMRVIHFGAGSDKGVAPGTAVL

SEQ ID NO: 12843 - protein, 25 aa, synthetic construct
  REGION 1..25: note = Description of Artificial Sequence: Synthetic peptide
YNMRVIHFGAGSDKGVAPGTAVLRQ

SEQ ID NO: 12844 - protein, 25 aa, synthetic construct
  REGION 1..25: note = Description of Artificial Sequence: Synthetic peptide
AVPYNMRVIHFGAGSDKGVAPGTAV

SEQ ID NO: 12845 - protein, 25 aa, synthetic construct
  REGION 1..25: note = Description of Artificial Sequence: Synthetic peptide
TLLALHRSYLTPGDSSSGWTAGAAA

SEQ ID NO: 12846 - protein, 25 aa, synthetic construct
  REGION 1..25: note = Description of Artificial Sequence: Synthetic peptide
AGSDKGVAPGTAVLRQWLPTGTLLV

SEQ ID NO: 12847 - protein, 25 aa, synthetic construct
  REGION 1..25: note = Description of Artificial Sequence: Synthetic peptide
TITQMNLKYAISAKNRARTVAGVSI

SEQ ID NO: 12848 - protein, 25 aa, synthetic construct
  REGION 1..25: note = Description of Artificial Sequence: Synthetic peptide
PTITQMNLKYAISAKNRARTVAGVS

SEQ ID NO: 12849 - protein, 25 aa, synthetic construct
  REGION 1..25: note = Description of Artificial Sequence: Synthetic peptide
ITQMNLKYAISAKNRARTVAGVSIC

SEQ ID NO: 12850 - protein, 25 aa, synthetic construct
  REGION 1..25: note = Description of Artificial Sequence: Synthetic peptide
FNVAITRAKVGILCIMSDRDLYDKL

SEQ ID NO: 12851 - protein, 25 aa, synthetic construct
  REGION 1..25: note = Description of Artificial Sequence: Synthetic peptide
VAITRAKVGILCIMSDRDLYDKLQF

SEQ ID NO: 12852 - protein, 25 aa, synthetic construct
  REGION 1..25: note = Description of Artificial Sequence: Synthetic peptide
RFNVAITRAKVGILCIMSDRDLYDK

SEQ ID NO: 12853 - protein, 25 aa, synthetic construct
  REGION 1..25: note = Description of Artificial Sequence: Synthetic peptide
NVAITRAKVGILCIMSDRDLYDKLQ

SEQ ID NO: 12854 - protein, 25 aa, synthetic construct
  REGION 1..25: note = Description of Artificial Sequence: Synthetic peptide
LYLQYIRKLHDELTGHMLDMYSVML

SEQ ID NO: 12855 - protein, 25 aa, synthetic construct
  REGION 1..25: note = Description of Artificial Sequence: Synthetic peptide
DYYRYNLPTMCDIRQLLFVVEVVDK

SEQ ID NO: 12856 - protein, 25 aa, synthetic construct
  REGION 1..25: note = Description of Artificial Sequence: Synthetic peptide
YYRYNLPTMCDIRQLLFVVEVVDKY

SEQ ID NO: 12857 - protein, 25 aa, synthetic construct
  REGION 1..25: note = Description of Artificial Sequence: Synthetic peptide
INFVRIIMRLWLCWKCRSKNPLLYD

SEQ ID NO: 12858 - protein, 25 aa, synthetic construct
  REGION 1..25: note = Description of Artificial Sequence: Synthetic peptide
NFVRIIMRLWLCWKCRSKNPLLYDA

SEQ ID NO: 12859 - protein, 25 aa, synthetic construct
  REGION 1..25: note = Description of Artificial Sequence: Synthetic peptide
KRHTFSNYQHEETIYNLLKDCPAVA

SEQ ID NO: 12860 - protein, 25 aa, synthetic construct
  REGION 1..25: note = Description of Artificial Sequence: Synthetic peptide
VKRHTFSNYQHEETIYNLLKDCPAV

SEQ ID NO: 12861 - protein, 25 aa, synthetic construct
  REGION 1..25: note = Description of Artificial Sequence: Synthetic peptide
VVKRHTFSNYQHEETIYNLLKDCPA

SEQ ID NO: 12862 - protein, 25 aa, synthetic construct
  REGION 1..25: note = Description of Artificial Sequence: Synthetic peptide
ECVRGTTVLLKEPCSSGTYEGNSPF

SEQ ID NO: 12863 - protein, 25 aa, synthetic construct
  REGION 1..25: note = Description of Artificial Sequence: Synthetic peptide
CVRGTTVLLKEPCSSGTYEGNSPFH

SEQ ID NO: 12864 - protein, 25 aa, synthetic construct
  REGION 1..25: note = Description of Artificial Sequence: Synthetic peptide
NGYPNMFITREEAIRHVRAWIGFDV

SEQ ID NO: 12865 - protein, 25 aa, synthetic construct
  REGION 1..25: note = Description of Artificial Sequence: Synthetic peptide
ISTIGVCSMTDIAKKPTETICAPLT

SEQ ID NO: 12866 - protein, 25 aa, synthetic construct
  REGION 1..25: note = Description of Artificial Sequence: Synthetic peptide
HISTIGVCSMTDIAKKPTETICAPL

SEQ ID NO: 12867 - protein, 25 aa, synthetic construct
  REGION 1..25: note = Description of Artificial Sequence: Synthetic peptide
TIGVCSMTDIAKKPTETICAPLTVF

SEQ ID NO: 12868 - protein, 25 aa, synthetic construct
  REGION 1..25: note = Description of Artificial Sequence: Synthetic peptide
STIGVCSMTDIAKKPTETICAPLTV

SEQ ID NO: 12869 - protein, 25 aa, synthetic construct
  REGION 1..25: note = Description of Artificial Sequence: Synthetic peptide
IAGLIAIVMVTIMLCCMTSCCSCLK

SEQ ID NO: 12870 - protein, 25 aa, synthetic construct
  REGION 1..25: note = Description of Artificial Sequence: Synthetic peptide
VMVTIMLCCMTSCCSCLKGCCSCGS

SEQ ID NO: 12871 - protein, 25 aa, synthetic construct
  REGION 1..25: note = Description of Artificial Sequence: Synthetic peptide
IVMVTIMLCCMTSCCSCLKGCCSCG

SEQ ID NO: 12872 - protein, 25 aa, synthetic construct
  REGION 1..25: note = Description of Artificial Sequence: Synthetic peptide
AIVMVTIMLCCMTSCCSCLKGCCSC

SEQ ID NO: 12873 - protein, 25 aa, synthetic construct
  REGION 1..25: note = Description of Artificial Sequence: Synthetic peptide
GLIAIVMVTIMLCCMTSCCSCLKGC

SEQ ID NO: 12874 - protein, 25 aa, synthetic construct
  REGION 1..25: note = Description of Artificial Sequence: Synthetic peptide
IAIVMVTIMLCCMTSCCSCLKGCCS

SEQ ID NO: 12875 - protein, 25 aa, synthetic construct
  REGION 1..25: note = Description of Artificial Sequence: Synthetic peptide
MVTIMLCCMTSCCSCLKGCCSCGSC

SEQ ID NO: 12876 - protein, 25 aa, synthetic construct
  REGION 1..25: note = Description of Artificial Sequence: Synthetic peptide
GFIAGLIAIVMVTIMLCCMTSCCSC

SEQ ID NO: 12877 - protein, 25 aa, synthetic construct
  REGION 1..25: note = Description of Artificial Sequence: Synthetic peptide
AGLIAIVMVTIMLCCMTSCCSCLKG

SEQ ID NO: 12878 - protein, 25 aa, synthetic construct
  REGION 1..25: note = Description of Artificial Sequence: Synthetic peptide
LIAIVMVTIMLCCMTSCCSCLKGCC

SEQ ID NO: 12879 - protein, 25 aa, synthetic construct
  REGION 1..25: note = Description of Artificial Sequence: Synthetic peptide
FIAGLIAIVMVTIMLCCMTSCCSCL

SEQ ID NO: 12880 - protein, 25 aa, synthetic construct
  REGION 1..25: note = Description of Artificial Sequence: Synthetic peptide
DHVISTSHKLVLSVNPYVCNAPGCD

SEQ ID NO: 12881 - protein, 25 aa, synthetic construct
  REGION 1..25: note = Description of Artificial Sequence: Synthetic peptide
LDDRCILHCANFNVLFSTVFPPTSF

SEQ ID NO: 12882 - protein, 25 aa, synthetic construct
  REGION 1..25: note = Description of Artificial Sequence: Synthetic peptide
QTVDSSQGSEYDYVIFTQTTETAHS

SEQ ID NO: 12883 - protein, 25 aa, synthetic construct
  REGION 1..25: note = Description of Artificial Sequence: Synthetic peptide
KTDGTLMIERFVSLAIDAYPLTKHP

SEQ ID NO: 12884 - protein, 25 aa, synthetic construct
  REGION 1..25: note = Description of Artificial Sequence: Synthetic peptide
TDGTLMIERFVSLAIDAYPLTKHPN

SEQ ID NO: 12885 - protein, 25 aa, synthetic construct
  REGION 1..25: note = Description of Artificial Sequence: Synthetic peptide
IKVCEFQFCNDPFLGVYYHKNNKSW

SEQ ID NO: 12886 - protein, 25 aa, synthetic construct
  REGION 1..25: note = Description of Artificial Sequence: Synthetic peptide
LIGLAKRFKESPFELEDFIPMDSTV

SEQ ID NO: 12887 - protein, 25 aa, synthetic construct
  REGION 1..25: note = Description of Artificial Sequence: Synthetic peptide
KVCEFQFCNDPFLGVYYHKNNKSWM

SEQ ID NO: 12888 - protein, 25 aa, synthetic construct
  REGION 1..25: note = Description of Artificial Sequence: Synthetic peptide
HLLIGLAKRFKESPFELEDFIPMDS

SEQ ID NO: 12889 - protein, 25 aa, synthetic construct
  REGION 1..25: note = Description of Artificial Sequence: Synthetic peptide
VIKVCEFQFCNDPFLGVYYHKNNKS

SEQ ID NO: 12890 - protein, 25 aa, synthetic construct
  REGION 1..25: note = Description of Artificial Sequence: Synthetic peptide
IGLAKRFKESPFELEDFIPMDSTVK

SEQ ID NO: 12891 - protein, 25 aa, synthetic construct
  REGION 1..25: note = Description of Artificial Sequence: Synthetic peptide
LLIGLAKRFKESPFELEDFIPMDST

SEQ ID NO: 12892 - protein, 25 aa, synthetic construct
  REGION 1..25: note = Description of Artificial Sequence: Synthetic peptide
GTYEGNSPFHPLADNKFALTCFSTQ

SEQ ID NO: 12893 - protein, 25 aa, synthetic construct
  REGION 1..25: note = Description of Artificial Sequence: Synthetic peptide
GNSPFHPLADNKFALTCFSTQFAFA

SEQ ID NO: 12894 - protein, 25 aa, synthetic construct
  REGION 1..25: note = Description of Artificial Sequence: Synthetic peptide
EGNSPFHPLADNKFALTCFSTQFAF

SEQ ID NO: 12895 - protein, 25 aa, synthetic construct
  REGION 1..25: note = Description of Artificial Sequence: Synthetic peptide
SPFHPLADNKFALTCFSTQFAFACP

SEQ ID NO: 12896 - protein, 25 aa, synthetic construct
  REGION 1..25: note = Description of Artificial Sequence: Synthetic peptide
NITNLCPFGEVFNATRFASVYAWNR

SEQ ID NO: 12897 - protein, 25 aa, synthetic construct
  REGION 1..25: note = Description of Artificial Sequence: Synthetic peptide
HTPAFDKSAFVNLKQLPFFYYSDSP

SEQ ID NO: 12898 - protein, 25 aa, synthetic construct
  REGION 1..25: note = Description of Artificial Sequence: Synthetic peptide
VNKHAFHTPAFDKSAFVNLKQLPFF

SEQ ID NO: 12899 - protein, 25 aa, synthetic construct
  REGION 1..25: note = Description of Artificial Sequence: Synthetic peptide
FHTPAFDKSAFVNLKQLPFFYYSDS

SEQ ID NO: 12900 - protein, 25 aa, synthetic construct
  REGION 1..25: note = Description of Artificial Sequence: Synthetic peptide
KHAFHTPAFDKSAFVNLKQLPFFYY

SEQ ID NO: 12901 - protein, 25 aa, synthetic construct
  REGION 1..25: note = Description of Artificial Sequence: Synthetic peptide
NKHAFHTPAFDKSAFVNLKQLPFFY

SEQ ID NO: 12902 - protein, 25 aa, synthetic construct
  REGION 1..25: note = Description of Artificial Sequence: Synthetic peptide
TPAFDKSAFVNLKQLPFFYYSDSPC

SEQ ID NO: 12903 - protein, 25 aa, synthetic construct
  REGION 1..25: note = Description of Artificial Sequence: Synthetic peptide
HAFHTPAFDKSAFVNLKQLPFFYYS

SEQ ID NO: 12904 - protein, 25 aa, synthetic construct
  REGION 1..25: note = Description of Artificial Sequence: Synthetic peptide
AFHTPAFDKSAFVNLKQLPFFYYSD

SEQ ID NO: 12905 - protein, 25 aa, synthetic construct
  REGION 1..25: note = Description of Artificial Sequence: Synthetic peptide
ADYSVLYNSASFSTFKCYGVSPTKL

SEQ ID NO: 12906 - protein, 25 aa, synthetic construct
  REGION 1..25: note = Description of Artificial Sequence: Synthetic peptide
VADYSVLYNSASFSTFKCYGVSPTK

SEQ ID NO: 12907 - protein, 25 aa, synthetic construct
  REGION 1..25: note = Description of Artificial Sequence: Synthetic peptide
VVIGTSKFYGGWHNMLKTVYSDVEN

SEQ ID NO: 12908 - protein, 25 aa, synthetic construct
  REGION 1..25: note = Description of Artificial Sequence: Synthetic peptide
GTLIVNSVLLFLAFVVFLLVTLAIL

SEQ ID NO: 12909 - protein, 25 aa, synthetic construct
  REGION 1..25: note = Description of Artificial Sequence: Synthetic peptide
TGTLIVNSVLLFLAFVVFLLVTLAI

SEQ ID NO: 12910 - protein, 25 aa, synthetic construct
  REGION 1..25: note = Description of Artificial Sequence: Synthetic peptide
PAQLPAPRTLLTKGTLEPEYFNSVC

SEQ ID NO: 12911 - protein, 25 aa, synthetic construct
  REGION 1..25: note = Description of Artificial Sequence: Synthetic peptide
GTSKFYGGWHNMLKTVYSDVENPHL

SEQ ID NO: 12912 - protein, 25 aa, synthetic construct
  REGION 1..25: note = Description of Artificial Sequence: Synthetic peptide
IGTSKFYGGWHNMLKTVYSDVENPH

SEQ ID NO: 12913 - protein, 25 aa, synthetic construct
  REGION 1..25: note = Description of Artificial Sequence: Synthetic peptide
TSPDVDLGDISGINASVVNIQKEID

SEQ ID NO: 12914 - protein, 25 aa, synthetic construct
  REGION 1..25: note = Description of Artificial Sequence: Synthetic peptide
HTSPDVDLGDISGINASVVNIQKEI

SEQ ID NO: 12915 - protein, 25 aa, synthetic construct
  REGION 1..25: note = Description of Artificial Sequence: Synthetic peptide
CLPFTINCQEPKLGSLVVRCSFYED

SEQ ID NO: 12916 - protein, 25 aa, synthetic construct
  REGION 1..25: note = Description of Artificial Sequence: Synthetic peptide
SCLPFTINCQEPKLGSLVVRCSFYE

SEQ ID NO: 12917 - protein, 25 aa, synthetic construct
  REGION 1..25: note = Description of Artificial Sequence: Synthetic peptide
SHTVMPLSAPTLVPQEHYVRITGLY

SEQ ID NO: 12918 - protein, 25 aa, synthetic construct
  REGION 1..25: note = Description of Artificial Sequence: Synthetic peptide
SEYDYVIFTQTTETAHSCNVNRFNV

SEQ ID NO: 12919 - protein, 25 aa, synthetic construct
  REGION 1..25: note = Description of Artificial Sequence: Synthetic peptide
YDYVIFTQTTETAHSCNVNRFNVAI

SEQ ID NO: 12920 - protein, 25 aa, synthetic construct
  REGION 1..25: note = Description of Artificial Sequence: Synthetic peptide
EYDYVIFTQTTETAHSCNVNRFNVA

SEQ ID NO: 12921 - protein, 25 aa, synthetic construct
  REGION 1..25: note = Description of Artificial Sequence: Synthetic peptide
TACSHAAVDALCEKALKYLPIDKCS

SEQ ID NO: 12922 - protein, 25 aa, synthetic construct
  REGION 1..25: note = Description of Artificial Sequence: Synthetic peptide
FRKSNLKPFERDISTEIYQAGSTPC

SEQ ID NO: 12923 - protein, 25 aa, synthetic construct
  REGION 1..25: note = Description of Artificial Sequence: Synthetic peptide
LFRKSNLKPFERDISTEIYQAGSTP

SEQ ID NO: 12924 - protein, 25 aa, synthetic construct
  REGION 1..25: note = Description of Artificial Sequence: Synthetic peptide
RLFRKSNLKPFERDISTEIYQAGST

SEQ ID NO: 12925 - protein, 25 aa, synthetic construct
  REGION 1..25: note = Description of Artificial Sequence: Synthetic peptide
YRLFRKSNLKPFERDISTEIYQAGS

SEQ ID NO: 12926 - protein, 25 aa, synthetic construct
  REGION 1..25: note = Description of Artificial Sequence: Synthetic peptide
RKSNLKPFERDISTEIYQAGSTPCN

SEQ ID NO: 12927 - protein, 25 aa, synthetic construct
  REGION 1..25: note = Description of Artificial Sequence: Synthetic peptide
DLATNNLVVMAYITGGVVQLTSQWL

SEQ ID NO: 12928 - protein, 25 aa, synthetic construct
  REGION 1..25: note = Description of Artificial Sequence: Synthetic peptide
NSFTRGVYYPDKVFRSSVLHSTQDL

SEQ ID NO: 12929 - protein, 25 aa, synthetic construct
  REGION 1..25: note = Description of Artificial Sequence: Synthetic peptide
FEKGDYGDAVVYRGTTTYKLNVGDY

SEQ ID NO: 12930 - protein, 25 aa, synthetic construct
  REGION 1..25: note = Description of Artificial Sequence: Synthetic peptide
EKGDYGDAVVYRGTTTYKLNVGDYF

SEQ ID NO: 12931 - protein, 25 aa, synthetic construct
  REGION 1..25: note = Description of Artificial Sequence: Synthetic peptide
WTIEYPIIGDELKINAACRKVQHMV

SEQ ID NO: 12932 - protein, 25 aa, synthetic construct
  REGION 1..25: note = Description of Artificial Sequence: Synthetic peptide
YPIIGDELKINAACRKVQHMVVKAA

SEQ ID NO: 12933 - protein, 25 aa, synthetic construct
  REGION 1..25: note = Description of Artificial Sequence: Synthetic peptide
IEYPIIGDELKINAACRKVQHMVVK

SEQ ID NO: 12934 - protein, 25 aa, synthetic construct
  REGION 1..25: note = Description of Artificial Sequence: Synthetic peptide
EYPIIGDELKINAACRKVQHMVVKA

SEQ ID NO: 12935 - protein, 25 aa, synthetic construct
  REGION 1..25: note = Description of Artificial Sequence: Synthetic peptide
TIEYPIIGDELKINAACRKVQHMVV

SEQ ID NO: 12936 - protein, 25 aa, synthetic construct
  REGION 1..25: note = Description of Artificial Sequence: Synthetic peptide
PIIGDELKINAACRKVQHMVVKAAL

SEQ ID NO: 12937 - protein, 25 aa, synthetic construct
  REGION 1..25: note = Description of Artificial Sequence: Synthetic peptide
TLVKQLSSNFGAISSVLNDILSRLD

SEQ ID NO: 12938 - protein, 25 aa, synthetic construct
  REGION 1..25: note = Description of Artificial Sequence: Synthetic peptide
NTLVKQLSSNFGAISSVLNDILSRL

SEQ ID NO: 12939 - protein, 25 aa, synthetic construct
  REGION 1..25: note = Description of Artificial Sequence: Synthetic peptide
AVASKILGLPTQTVDSSQGSEYDYV

SEQ ID NO: 12940 - protein, 25 aa, synthetic construct
  REGION 1..25: note = Description of Artificial Sequence: Synthetic peptide
NAVASKILGLPTQTVDSSQGSEYDY

SEQ ID NO: 12941 - protein, 25 aa, synthetic construct
  REGION 1..25: note = Description of Artificial Sequence: Synthetic peptide
VDALCEKALKYLPIDKCSRIIPARA

SEQ ID NO: 12942 - protein, 25 aa, synthetic construct
  REGION 1..25: note = Description of Artificial Sequence: Synthetic peptide
AQCFKMFYKGVITHDVSSAINRPQI

SEQ ID NO: 12943 - protein, 25 aa, synthetic construct
  REGION 1..25: note = Description of Artificial Sequence: Synthetic peptide
IWDYKRDAPAHISTIGVCSMTDIAK

SEQ ID NO: 12944 - protein, 25 aa, synthetic construct
  REGION 1..25: note = Description of Artificial Sequence: Synthetic peptide
NQVIVNNLDKSAGFPFNKWGKARLY

SEQ ID NO: 12945 - protein, 25 aa, synthetic construct
  REGION 1..25: note = Description of Artificial Sequence: Synthetic peptide
ESSAKSASVYYSQLMCQPILLLDQA

SEQ ID NO: 12946 - protein, 25 aa, synthetic construct
  REGION 1..25: note = Description of Artificial Sequence: Synthetic peptide
KCEESSAKSASVYYSQLMCQPILLL

SEQ ID NO: 12947 - protein, 25 aa, synthetic construct
  REGION 1..25: note = Description of Artificial Sequence: Synthetic peptide
KSKCEESSAKSASVYYSQLMCQPIL

SEQ ID NO: 12948 - protein, 25 aa, synthetic construct
  REGION 1..25: note = Description of Artificial Sequence: Synthetic peptide
CEESSAKSASVYYSQLMCQPILLLD

SEQ ID NO: 12949 - protein, 25 aa, synthetic construct
  REGION 1..25: note = Description of Artificial Sequence: Synthetic peptide
GKSKCEESSAKSASVYYSQLMCQPI

SEQ ID NO: 12950 - protein, 25 aa, synthetic construct
  REGION 1..25: note = Description of Artificial Sequence: Synthetic peptide
SKCEESSAKSASVYYSQLMCQPILL

SEQ ID NO: 12951 - protein, 25 aa, synthetic construct
  REGION 1..25: note = Description of Artificial Sequence: Synthetic peptide
EESSAKSASVYYSQLMCQPILLLDQ

SEQ ID NO: 12952 - protein, 25 aa, synthetic construct
  REGION 1..25: note = Description of Artificial Sequence: Synthetic peptide
KSAQCFKMFYKGVITHDVSSAINRP

SEQ ID NO: 12953 - protein, 25 aa, synthetic construct
  REGION 1..25: note = Description of Artificial Sequence: Synthetic peptide
CYDGGCINANQVIVNNLDKSAGFPF

SEQ ID NO: 12954 - protein, 25 aa, synthetic construct
  REGION 1..25: note = Description of Artificial Sequence: Synthetic peptide
HTPINLVRDLPQGFSALEPLVDLPI

SEQ ID NO: 12955 - protein, 25 aa, synthetic construct
  REGION 1..25: note = Description of Artificial Sequence: Synthetic peptide
KHTPINLVRDLPQGFSALEPLVDLP

SEQ ID NO: 12956 - protein, 25 aa, synthetic construct
  REGION 1..25: note = Description of Artificial Sequence: Synthetic peptide
YKGVITHDVSSAINRPQIGVVREFL

SEQ ID NO: 12957 - protein, 25 aa, synthetic construct
  REGION 1..25: note = Description of Artificial Sequence: Synthetic peptide
DNINLHTQVVDMSMTYGQQFGPTYL

SEQ ID NO: 12958 - protein, 25 aa, synthetic construct
  REGION 1..25: note = Description of Artificial Sequence: Synthetic peptide
VDNINLHTQVVDMSMTYGQQFGPTY

SEQ ID NO: 12959 - protein, 25 aa, synthetic construct
  REGION 1..25: note = Description of Artificial Sequence: Synthetic peptide
QRKYKGIKIQEGVVDYGARFYFYTS

SEQ ID NO: 12960 - protein, 25 aa, synthetic construct
  REGION 1..25: note = Description of Artificial Sequence: Synthetic peptide
KYKGIKIQEGVVDYGARFYFYTSKT

SEQ ID NO: 12961 - protein, 25 aa, synthetic construct
  REGION 1..25: note = Description of Artificial Sequence: Synthetic peptide
TIKVFTTVDNINLHTQVVDMSMTYG

SEQ ID NO: 12962 - protein, 25 aa, synthetic construct
  REGION 1..25: note = Description of Artificial Sequence: Synthetic peptide
RKYKGIKIQEGVVDYGARFYFYTSK

SEQ ID NO: 12963 - protein, 25 aa, synthetic construct
  REGION 1..25: note = Description of Artificial Sequence: Synthetic peptide
NSQNAVASKILGLPTQTVDSSQGSE

SEQ ID NO: 12964 - protein, 25 aa, synthetic construct
  REGION 1..25: note = Description of Artificial Sequence: Synthetic peptide
PYNSQNAVASKILGLPTQTVDSSQG

SEQ ID NO: 12965 - protein, 25 aa, synthetic construct
  REGION 1..25: note = Description of Artificial Sequence: Synthetic peptide
YNSQNAVASKILGLPTQTVDSSQGS

SEQ ID NO: 12966 - protein, 25 aa, synthetic construct
  REGION 1..25: note = Description of Artificial Sequence: Synthetic peptide
SQNAVASKILGLPTQTVDSSQGSEY

SEQ ID NO: 12967 - protein, 25 aa, synthetic construct
  REGION 1..25: note = Description of Artificial Sequence: Synthetic peptide
VNLHSSRLSFKELLVYAADPAMHAA

SEQ ID NO: 12968 - protein, 25 aa, synthetic construct
  REGION 1..25: note = Description of Artificial Sequence: Synthetic peptide
CTMYICGDSTECSNLLLQYGSFCTQ

SEQ ID NO: 12969 - protein, 25 aa, synthetic construct
  REGION 1..25: note = Description of Artificial Sequence: Synthetic peptide
LLKSIAATRGATVVIGTSKFYGGWH

SEQ ID NO: 12970 - protein, 25 aa, synthetic construct
  REGION 1..25: note = Description of Artificial Sequence: Synthetic peptide
LKSIAATRGATVVIGTSKFYGGWHN

SEQ ID NO: 12971 - protein, 25 aa, synthetic construct
  REGION 1..25: note = Description of Artificial Sequence: Synthetic peptide
TFEYVSQPFLMDLEGKQGNFKNLRE

SEQ ID NO: 12972 - protein, 25 aa, synthetic construct
  REGION 1..25: note = Description of Artificial Sequence: Synthetic peptide
FEYVSQPFLMDLEGKQGNFKNLREF

SEQ ID NO: 12973 - protein, 25 aa, synthetic construct
  REGION 1..25: note = Description of Artificial Sequence: Synthetic peptide
GDQELIRQGTDYKHWPQIAQFAPSA

SEQ ID NO: 12974 - protein, 25 aa, synthetic construct
  REGION 1..25: note = Description of Artificial Sequence: Synthetic peptide
ETGTLIVNSVLLFLAFVVFLLVTLA

SEQ ID NO: 12975 - protein, 25 aa, synthetic construct
  REGION 1..25: note = Description of Artificial Sequence: Synthetic peptide
ETTADIVVFDEISMATNYDLSVVNA

SEQ ID NO: 12976 - protein, 25 aa, synthetic construct
  REGION 1..25: note = Description of Artificial Sequence: Synthetic peptide
RKRISNCVADYSVLYNSASFSTFKC

SEQ ID NO: 12977 - protein, 25 aa, synthetic construct
  REGION 1..25: note = Description of Artificial Sequence: Synthetic peptide
MCDIRQLLFVVEVVDKYFDCYDGGC

SEQ ID NO: 12978 - protein, 25 aa, synthetic construct
  REGION 1..25: note = Description of Artificial Sequence: Synthetic peptide
CDIRQLLFVVEVVDKYFDCYDGGCI

SEQ ID NO: 12979 - protein, 25 aa, synthetic construct
  REGION 1..25: note = Description of Artificial Sequence: Synthetic peptide
TMCDIRQLLFVVEVVDKYFDCYDGG

SEQ ID NO: 12980 - protein, 25 aa, synthetic construct
  REGION 1..25: note = Description of Artificial Sequence: Synthetic peptide
PDPSKPSKRSFIEDLLFNKVTLADA

SEQ ID NO: 12981 - protein, 25 aa, synthetic construct
  REGION 1..25: note = Description of Artificial Sequence: Synthetic peptide
LIIMRTFKVSIWNLDYIINLIIKNL

SEQ ID NO: 12982 - protein, 25 aa, synthetic construct
  REGION 1..25: note = Description of Artificial Sequence: Synthetic peptide
IIMRTFKVSIWNLDYIINLIIKNLS

SEQ ID NO: 12983 - protein, 25 aa, synthetic construct
  REGION 1..25: note = Description of Artificial Sequence: Synthetic peptide
LFIRQEEVQELYSPIFLIVAAIVFI

SEQ ID NO: 12984 - protein, 25 aa, synthetic construct
  REGION 1..25: note = Description of Artificial Sequence: Synthetic peptide
KLFIRQEEVQELYSPIFLIVAAIVF

SEQ ID NO: 12985 - protein, 25 aa, synthetic construct
  REGION 1..25: note = Description of Artificial Sequence: Synthetic peptide
EITVATSRTLSYYKLGASQRVAGDS

SEQ ID NO: 12986 - protein, 25 aa, synthetic construct
  REGION 1..25: note = Description of Artificial Sequence: Synthetic peptide
ITVATSRTLSYYKLGASQRVAGDSG

SEQ ID NO: 12987 - protein, 25 aa, synthetic construct
  REGION 1..25: note = Description of Artificial Sequence: Synthetic peptide
VATSRTLSYYKLGASQRVAGDSGFA

SEQ ID NO: 12988 - protein, 25 aa, synthetic construct
  REGION 1..25: note = Description of Artificial Sequence: Synthetic peptide
TVATSRTLSYYKLGASQRVAGDSGF

SEQ ID NO: 12989 - protein, 25 aa, synthetic construct
  REGION 1..25: note = Description of Artificial Sequence: Synthetic peptide
DTWFSQRGGSYTNDKACPLIAAVIT

SEQ ID NO: 12990 - protein, 25 aa, synthetic construct
  REGION 1..25: note = Description of Artificial Sequence: Synthetic peptide
FSQRGGSYTNDKACPLIAAVITREV

SEQ ID NO: 12991 - protein, 25 aa, synthetic construct
  REGION 1..25: note = Description of Artificial Sequence: Synthetic peptide
WFSQRGGSYTNDKACPLIAAVITRE

SEQ ID NO: 12992 - protein, 25 aa, synthetic construct
  REGION 1..25: note = Description of Artificial Sequence: Synthetic peptide
TWFSQRGGSYTNDKACPLIAAVITR

SEQ ID NO: 12993 - protein, 25 aa, synthetic construct
  REGION 1..25: note = Description of Artificial Sequence: Synthetic peptide
FDTWFSQRGGSYTNDKACPLIAAVI

SEQ ID NO: 12994 - protein, 25 aa, synthetic construct
  REGION 1..25: note = Description of Artificial Sequence: Synthetic peptide
IFLWLLWPVTLACFVLAAVYRINWI

SEQ ID NO: 12995 - protein, 25 aa, synthetic construct
  REGION 1..25: note = Description of Artificial Sequence: Synthetic peptide
KLIFLWLLWPVTLACFVLAAVYRIN

SEQ ID NO: 12996 - protein, 25 aa, synthetic construct
  REGION 1..25: note = Description of Artificial Sequence: Synthetic peptide
LIFLWLLWPVTLACFVLAAVYRINW

SEQ ID NO: 12997 - protein, 25 aa, synthetic construct
  REGION 1..25: note = Description of Artificial Sequence: Synthetic peptide
QGNFKNLREFVFKNIDGYFKIYSKH

SEQ ID NO: 12998 - protein, 25 aa, synthetic construct
  REGION 1..25: note = Description of Artificial Sequence: Synthetic peptide
VRITGLYPTLNISDEFSSNVANYQK

SEQ ID NO: 12999 - protein, 25 aa, synthetic construct
  REGION 1..25: note = Description of Artificial Sequence: Synthetic peptide
SLQTYVTQQLIRAAEIRASANLAAT

SEQ ID NO: 13000 - protein, 25 aa, synthetic construct
  REGION 1..25: note = Description of Artificial Sequence: Synthetic peptide
DLFMRIFTIGTVTLKQGEIKDATPS

SEQ ID NO: 13001 - protein, 25 aa, synthetic construct
  REGION 1..25: note = Description of Artificial Sequence: Synthetic peptide
MDLFMRIFTIGTVTLKQGEIKDATP

SEQ ID NO: 13002 - protein, 25 aa, synthetic construct
  REGION 1..25: note = Description of Artificial Sequence: Synthetic peptide
LYSPIFLIVAAIVFITLCFTLKRKT

SEQ ID NO: 13003 - protein, 25 aa, synthetic construct
  REGION 1..25: note = Description of Artificial Sequence: Synthetic peptide
YSPIFLIVAAIVFITLCFTLKRKTE

SEQ ID NO: 13004 - protein, 25 aa, synthetic construct
  REGION 1..25: note = Description of Artificial Sequence: Synthetic peptide
YPTLNISDEFSSNVANYQKVGMQKY

SEQ ID NO: 13005 - protein, 25 aa, synthetic construct
  REGION 1..25: note = Description of Artificial Sequence: Synthetic peptide
LNISDEFSSNVANYQKVGMQKYSTL

SEQ ID NO: 13006 - protein, 25 aa, synthetic construct
  REGION 1..25: note = Description of Artificial Sequence: Synthetic peptide
ITGLYPTLNISDEFSSNVANYQKVG

SEQ ID NO: 13007 - protein, 25 aa, synthetic construct
  REGION 1..25: note = Description of Artificial Sequence: Synthetic peptide
ISDEFSSNVANYQKVGMQKYSTLQG

SEQ ID NO: 13008 - protein, 25 aa, synthetic construct
  REGION 1..25: note = Description of Artificial Sequence: Synthetic peptide
TLNISDEFSSNVANYQKVGMQKYST

SEQ ID NO: 13009 - protein, 25 aa, synthetic construct
  REGION 1..25: note = Description of Artificial Sequence: Synthetic peptide
LYPTLNISDEFSSNVANYQKVGMQK

SEQ ID NO: 13010 - protein, 25 aa, synthetic construct
  REGION 1..25: note = Description of Artificial Sequence: Synthetic peptide
PTLNISDEFSSNVANYQKVGMQKYS

SEQ ID NO: 13011 - protein, 25 aa, synthetic construct
  REGION 1..25: note = Description of Artificial Sequence: Synthetic peptide
TGLYPTLNISDEFSSNVANYQKVGM

SEQ ID NO: 13012 - protein, 25 aa, synthetic construct
  REGION 1..25: note = Description of Artificial Sequence: Synthetic peptide
GLYPTLNISDEFSSNVANYQKVGMQ

SEQ ID NO: 13013 - protein, 25 aa, synthetic construct
  REGION 1..25: note = Description of Artificial Sequence: Synthetic peptide
NISDEFSSNVANYQKVGMQKYSTLQ

SEQ ID NO: 13014 - protein, 25 aa, synthetic construct
  REGION 1..25: note = Description of Artificial Sequence: Synthetic peptide
FIRQEEVQELYSPIFLIVAAIVFIT

SEQ ID NO: 13015 - protein, 25 aa, synthetic construct
  REGION 1..25: note = Description of Artificial Sequence: Synthetic peptide
RQEEVQELYSPIFLIVAAIVFITLC

SEQ ID NO: 13016 - protein, 25 aa, synthetic construct
  REGION 1..25: note = Description of Artificial Sequence: Synthetic peptide
IRQEEVQELYSPIFLIVAAIVFITL

SEQ ID NO: 13017 - protein, 25 aa, synthetic construct
  REGION 1..25: note = Description of Artificial Sequence: Synthetic peptide
QEEVQELYSPIFLIVAAIVFITLCF

SEQ ID NO: 13018 - protein, 25 aa, synthetic construct
  REGION 1..25: note = Description of Artificial Sequence: Synthetic peptide
RFPNITNLCPFGEVFNATRFASVYA

SEQ ID NO: 13019 - protein, 25 aa, synthetic construct
  REGION 1..25: note = Description of Artificial Sequence: Synthetic peptide
VCEFQFCNDPFLGVYYHKNNKSWME

SEQ ID NO: 13020 - protein, 25 aa, synthetic construct
  REGION 1..25: note = Description of Artificial Sequence: Synthetic peptide
CEFQFCNDPFLGVYYHKNNKSWMES

SEQ ID NO: 13021 - protein, 25 aa, synthetic construct
  REGION 1..25: note = Description of Artificial Sequence: Synthetic peptide
IPLMYKGLPWNVVRIKIVQMLSDTL

SEQ ID NO: 13022 - protein, 25 aa, synthetic construct
  REGION 1..25: note = Description of Artificial Sequence: Synthetic peptide
IEDLLFNKVTLADAGFIKQYGDCLG

SEQ ID NO: 13023 - protein, 25 aa, synthetic construct
  REGION 1..25: note = Description of Artificial Sequence: Synthetic peptide
EPMLQSADAQSFLNRVCGVSAARLT

SEQ ID NO: 13024 - protein, 25 aa, synthetic construct
  REGION 1..25: note = Description of Artificial Sequence: Synthetic peptide
CSCDQLREPMLQSADAQSFLNGFAV

SEQ ID NO: 13025 - protein, 25 aa, synthetic construct
  REGION 1..25: note = Description of Artificial Sequence: Synthetic peptide
YGCSCDQLREPMLQSADAQSFLNGF

SEQ ID NO: 13026 - protein, 25 aa, synthetic construct
  REGION 1..25: note = Description of Artificial Sequence: Synthetic peptide
GCSCDQLREPMLQSADAQSFLNGFA

SEQ ID NO: 13027 - protein, 25 aa, synthetic construct
  REGION 1..25: note = Description of Artificial Sequence: Synthetic peptide
PIGALDISASIVAGGIVAIVVTCLA

SEQ ID NO: 13028 - protein, 25 aa, synthetic construct
  REGION 1..25: note = Description of Artificial Sequence: Synthetic peptide
QPIGALDISASIVAGGIVAIVVTCL

SEQ ID NO: 13029 - protein, 25 aa, synthetic construct
  REGION 1..25: note = Description of Artificial Sequence: Synthetic peptide
IGALDISASIVAGGIVAIVVTCLAY

SEQ ID NO: 13030 - protein, 25 aa, synthetic construct
  REGION 1..25: note = Description of Artificial Sequence: Synthetic peptide
GALDISASIVAGGIVAIVVTCLAYY

SEQ ID NO: 13031 - protein, 25 aa, synthetic construct
  REGION 1..25: note = Description of Artificial Sequence: Synthetic peptide
ALDPLSETKCTLKSFTVEKGIYQTS

SEQ ID NO: 13032 - protein, 25 aa, synthetic construct
  REGION 1..25: note = Description of Artificial Sequence: Synthetic peptide
DYVYLPYPDPSRILGAGCFVDDIVK

SEQ ID NO: 13033 - protein, 25 aa, synthetic construct
  REGION 1..25: note = Description of Artificial Sequence: Synthetic peptide
YLPYPDPSRILGAGCFVDDIVKTDG

SEQ ID NO: 13034 - protein, 25 aa, synthetic construct
  REGION 1..25: note = Description of Artificial Sequence: Synthetic peptide
VYLPYPDPSRILGAGCFVDDIVKTD

SEQ ID NO: 13035 - protein, 25 aa, synthetic construct
  REGION 1..25: note = Description of Artificial Sequence: Synthetic peptide
LPYPDPSRILGAGCFVDDIVKTDGT

SEQ ID NO: 13036 - protein, 25 aa, synthetic construct
  REGION 1..25: note = Description of Artificial Sequence: Synthetic peptide
YVYLPYPDPSRILGAGCFVDDIVKT

SEQ ID NO: 13037 - protein, 25 aa, synthetic construct
  REGION 1..25: note = Description of Artificial Sequence: Synthetic peptide
PYPDPSRILGAGCFVDDIVKTDGTL

SEQ ID NO: 13038 - protein, 25 aa, synthetic construct
  REGION 1..25: note = Description of Artificial Sequence: Synthetic peptide
MLKTVYSDVENPHLMGWDYPKCDRA

SEQ ID NO: 13039 - protein, 25 aa, synthetic construct
  REGION 1..25: note = Description of Artificial Sequence: Synthetic peptide
NMLKTVYSDVENPHLMGWDYPKCDR

SEQ ID NO: 13040 - protein, 25 aa, synthetic construct
  REGION 1..25: note = Description of Artificial Sequence: Synthetic peptide
LKTVYSDVENPHLMGWDYPKCDRAM

SEQ ID NO: 13041 - protein, 25 aa, synthetic construct
  REGION 1..25: note = Description of Artificial Sequence: Synthetic peptide
KRTTCFSVAALTNNVAFQTVKPGNF

SEQ ID NO: 13042 - protein, 25 aa, synthetic construct
  REGION 1..25: note = Description of Artificial Sequence: Synthetic peptide
LYENQKLIANQFNSAIGKIQDSLSS

SEQ ID NO: 13043 - protein, 25 aa, synthetic construct
  REGION 1..25: note = Description of Artificial Sequence: Synthetic peptide
ENQKLIANQFNSAIGKIQDSLSSTA

SEQ ID NO: 13044 - protein, 25 aa, synthetic construct
  REGION 1..25: note = Description of Artificial Sequence: Synthetic peptide
TQNVLYENQKLIANQFNSAIGKIQD

SEQ ID NO: 13045 - protein, 25 aa, synthetic construct
  REGION 1..25: note = Description of Artificial Sequence: Synthetic peptide
YENQKLIANQFNSAIGKIQDSLSST

SEQ ID NO: 13046 - protein, 25 aa, synthetic construct
  REGION 1..25: note = Description of Artificial Sequence: Synthetic peptide
QNVLYENQKLIANQFNSAIGKIQDS

SEQ ID NO: 13047 - protein, 25 aa, synthetic construct
  REGION 1..25: note = Description of Artificial Sequence: Synthetic peptide
NVLYENQKLIANQFNSAIGKIQDSL

SEQ ID NO: 13048 - protein, 25 aa, synthetic construct
  REGION 1..25: note = Description of Artificial Sequence: Synthetic peptide
VLYENQKLIANQFNSAIGKIQDSLS

SEQ ID NO: 13049 - protein, 25 aa, synthetic construct
  REGION 1..25: note = Description of Artificial Sequence: Synthetic peptide
TEETFKLSYGIATVREVLSDRELHL

SEQ ID NO: 13050 - protein, 25 aa, synthetic construct
  REGION 1..25: note = Description of Artificial Sequence: Synthetic peptide
SSNFGAISSVLNDILSRLDKVEAEV

SEQ ID NO: 13051 - protein, 25 aa, synthetic construct
  REGION 1..25: note = Description of Artificial Sequence: Synthetic peptide
HLGRCDIKDLPKEITVATSRTLSYY

SEQ ID NO: 13052 - protein, 25 aa, synthetic construct
  REGION 1..25: note = Description of Artificial Sequence: Synthetic peptide
WYFYYLGTGPEAGLPYGANKDGIIW

SEQ ID NO: 13053 - protein, 25 aa, synthetic construct
  REGION 1..25: note = Description of Artificial Sequence: Synthetic peptide
PRWYFYYLGTGPEAGLPYGANKDGI

SEQ ID NO: 13054 - protein, 25 aa, synthetic construct
  REGION 1..25: note = Description of Artificial Sequence: Synthetic peptide
RWYFYYLGTGPEAGLPYGANKDGII

SEQ ID NO: 13055 - protein, 25 aa, synthetic construct
  REGION 1..25: note = Description of Artificial Sequence: Synthetic peptide
ISFMLWCKDGHVETFYPKLQSSQAW

SEQ ID NO: 13056 - protein, 25 aa, synthetic construct
  REGION 1..25: note = Description of Artificial Sequence: Synthetic peptide
EISFMLWCKDGHVETFYPKLQSSQA

SEQ ID NO: 13057 - protein, 25 aa, synthetic construct
  REGION 1..25: note = Description of Artificial Sequence: Synthetic peptide
DKVFRSSVLHSTQDLFLPFFSNVTW

SEQ ID NO: 13058 - protein, 25 aa, synthetic construct
  REGION 1..25: note = Description of Artificial Sequence: Synthetic peptide
VRIKIVQMLSDTLKNLSDRVVFVLW

SEQ ID NO: 13059 - protein, 25 aa, synthetic construct
  REGION 1..25: note = Description of Artificial Sequence: Synthetic peptide
VTQNVLYENQKLIANQFNSAIGKIQ

SEQ ID NO: 13060 - protein, 25 aa, synthetic construct
  REGION 1..25: note = Description of Artificial Sequence: Synthetic peptide
GVTQNVLYENQKLIANQFNSAIGKI

SEQ ID NO: 13061 - protein, 25 aa, synthetic construct
  REGION 1..25: note = Description of Artificial Sequence: Synthetic peptide
IGVTQNVLYENQKLIANQFNSAIGK

SEQ ID NO: 13062 - protein, 25 aa, synthetic construct
  REGION 1..25: note = Description of Artificial Sequence: Synthetic peptide
REVLSDRELHLSWEVGKPRPPLNRN

SEQ ID NO: 13063 - protein, 25 aa, synthetic construct
  REGION 1..25: note = Description of Artificial Sequence: Synthetic peptide
EVLSDRELHLSWEVGKPRPPLNRNY

SEQ ID NO: 13064 - protein, 25 aa, synthetic construct
  REGION 1..25: note = Description of Artificial Sequence: Synthetic peptide
VLSDRELHLSWEVGKPRPPLNRNYV

SEQ ID NO: 13065 - protein, 25 aa, synthetic construct
  REGION 1..25: note = Description of Artificial Sequence: Synthetic peptide
CVPQADVEWKFYDAQPCSDKAYKIE

SEQ ID NO: 13066 - protein, 25 aa, synthetic construct
  REGION 1..25: note = Description of Artificial Sequence: Synthetic peptide
VPQADVEWKFYDAQPCSDKAYKIEE

SEQ ID NO: 13067 - protein, 25 aa, synthetic construct
  REGION 1..25: note = Description of Artificial Sequence: Synthetic peptide
DGYFKIYSKHTPINLVRDLPQGFSA

SEQ ID NO: 13068 - protein, 25 aa, synthetic construct
  REGION 1..25: note = Description of Artificial Sequence: Synthetic peptide
QYVFCTVNALPETTADIVVFDEISM

SEQ ID NO: 13069 - protein, 25 aa, synthetic construct
  REGION 1..25: note = Description of Artificial Sequence: Synthetic peptide
KEITVATSRTLSYYKLGASQRVAGD

SEQ ID NO: 13070 - protein, 25 aa, synthetic construct
  REGION 1..25: note = Description of Artificial Sequence: Synthetic peptide
TERLKLFAAETLKATEETFKLSYGI

SEQ ID NO: 13071 - protein, 25 aa, synthetic construct
  REGION 1..25: note = Description of Artificial Sequence: Synthetic peptide
SPRRARSVASQSIIAYTMSLGAENS

SEQ ID NO: 13072 - protein, 25 aa, synthetic construct
  REGION 1..25: note = Description of Artificial Sequence: Synthetic peptide
NSPRRARSVASQSIIAYTMSLGAEN

SEQ ID NO: 13073 - protein, 25 aa, synthetic construct
  REGION 1..25: note = Description of Artificial Sequence: Synthetic peptide
FSLWVYKQFDTYNLWNTFTRLQSLE

SEQ ID NO: 13074 - protein, 25 aa, synthetic construct
  REGION 1..25: note = Description of Artificial Sequence: Synthetic peptide
SFMLWCKDGHVETFYPKLQSSQAWQ

SEQ ID NO: 13075 - protein, 25 aa, synthetic construct
  REGION 1..25: note = Description of Artificial Sequence: Synthetic peptide
TQTNSPRRARSVASQSIIAYTMSLG

SEQ ID NO: 13076 - protein, 25 aa, synthetic construct
  REGION 1..25: note = Description of Artificial Sequence: Synthetic peptide
QTQTNSPRRARSVASQSIIAYTMSL

SEQ ID NO: 13077 - protein, 25 aa, synthetic construct
  REGION 1..25: note = Description of Artificial Sequence: Synthetic peptide
QTNSPRRARSVASQSIIAYTMSLGA

SEQ ID NO: 13078 - protein, 25 aa, synthetic construct
  REGION 1..25: note = Description of Artificial Sequence: Synthetic peptide
CCNIVNVSLVKPSFYVYSRVKNLNS

SEQ ID NO: 13079 - protein, 25 aa, synthetic construct
  REGION 1..25: note = Description of Artificial Sequence: Synthetic peptide
NIVNVSLVKPSFYVYSRVKNLNSSR

SEQ ID NO: 13080 - protein, 25 aa, synthetic construct
  REGION 1..25: note = Description of Artificial Sequence: Synthetic peptide
CNIVNVSLVKPSFYVYSRVKNLNSS

SEQ ID NO: 13081 - protein, 25 aa, synthetic construct
  REGION 1..25: note = Description of Artificial Sequence: Synthetic peptide
RRNVATLQAENVTGLFKDCSKVITG

SEQ ID NO: 13082 - protein, 25 aa, synthetic construct
  REGION 1..25: note = Description of Artificial Sequence: Synthetic peptide
RNVATLQAENVTGLFKDCSKVITGL

SEQ ID NO: 13083 - protein, 25 aa, synthetic construct
  REGION 1..25: note = Description of Artificial Sequence: Synthetic peptide
DRYPANSIVCRFDTRVLSNLNLPGC

SEQ ID NO: 13084 - protein, 25 aa, synthetic construct
  REGION 1..25: note = Description of Artificial Sequence: Synthetic peptide
RYPANSIVCRFDTRVLSNLNLPGCD

SEQ ID NO: 13085 - protein, 25 aa, synthetic construct
  REGION 1..25: note = Description of Artificial Sequence: Synthetic peptide
NYGDSATLPKGIMMNVAKYTQLCQY

SEQ ID NO: 13086 - protein, 25 aa, synthetic construct
  REGION 1..25: note = Description of Artificial Sequence: Synthetic peptide
YGDSATLPKGIMMNVAKYTQLCQYL

SEQ ID NO: 13087 - protein, 25 aa, synthetic construct
  REGION 1..25: note = Description of Artificial Sequence: Synthetic peptide
GDSATLPKGIMMNVAKYTQLCQYLN

SEQ ID NO: 13088 - protein, 25 aa, synthetic construct
  REGION 1..25: note = Description of Artificial Sequence: Synthetic peptide
CYMHHMELPTGVHAGTDLEGNFYGP

SEQ ID NO: 13089 - protein, 25 aa, synthetic construct
  REGION 1..25: note = Description of Artificial Sequence: Synthetic peptide
MHHMELPTGVHAGTDLEGNFYGPFV

SEQ ID NO: 13090 - protein, 25 aa, synthetic construct
  REGION 1..25: note = Description of Artificial Sequence: Synthetic peptide
YMHHMELPTGVHAGTDLEGNFYGPF

SEQ ID NO: 13091 - protein, 25 aa, synthetic construct
  REGION 1..25: note = Description of Artificial Sequence: Synthetic peptide
FCYMHHMELPTGVHAGTDLEGNFYG

SEQ ID NO: 13092 - protein, 25 aa, synthetic construct
  REGION 1..25: note = Description of Artificial Sequence: Synthetic peptide
SFCYMHHMELPTGVHAGTDLEGNFY

SEQ ID NO: 13093 - protein, 25 aa, synthetic construct
  REGION 1..25: note = Description of Artificial Sequence: Synthetic peptide
HHMELPTGVHAGTDLEGNFYGPFVD

SEQ ID NO: 13094 - protein, 25 aa, synthetic construct
  REGION 1..25: note = Description of Artificial Sequence: Synthetic peptide
APGTAVLRQWLPTGTLLVDSDLNDF

SEQ ID NO: 13095 - protein, 25 aa, synthetic construct
  REGION 1..25: note = Description of Artificial Sequence: Synthetic peptide
VAPGTAVLRQWLPTGTLLVDSDLND

SEQ ID NO: 13096 - protein, 25 aa, synthetic construct
  REGION 1..25: note = Description of Artificial Sequence: Synthetic peptide
GVAPGTAVLRQWLPTGTLLVDSDLN

SEQ ID NO: 13097 - protein, 25 aa, synthetic construct
  REGION 1..25: note = Description of Artificial Sequence: Synthetic peptide
GTAVLRQWLPTGTLLVDSDLNDFVS

SEQ ID NO: 13098 - protein, 25 aa, synthetic construct
  REGION 1..25: note = Description of Artificial Sequence: Synthetic peptide
PGTAVLRQWLPTGTLLVDSDLNDFV

SEQ ID NO: 13099 - protein, 25 aa, synthetic construct
  REGION 1..25: note = Description of Artificial Sequence: Synthetic peptide
ALVYDNKLKAHKDKSAQCFKMFYKG

SEQ ID NO: 13100 - protein, 25 aa, synthetic construct
  REGION 1..25: note = Description of Artificial Sequence: Synthetic peptide
VSALVYDNKLKAHKDKSAQCFKMFY

SEQ ID NO: 13101 - protein, 25 aa, synthetic construct
  REGION 1..25: note = Description of Artificial Sequence: Synthetic peptide
SALVYDNKLKAHKDKSAQCFKMFYK

SEQ ID NO: 13102 - protein, 25 aa, synthetic construct
  REGION 1..25: note = Description of Artificial Sequence: Synthetic peptide
LVYDNKLKAHKDKSAQCFKMFYKGV

SEQ ID NO: 13103 - protein, 25 aa, synthetic construct
  REGION 1..25: note = Description of Artificial Sequence: Synthetic peptide
GNFKNLREFVFKNIDGYFKIYSKHT

SEQ ID NO: 13104 - protein, 25 aa, synthetic construct
  REGION 1..25: note = Description of Artificial Sequence: Synthetic peptide
ECIKDLLARAGKASCTLSEQLDFID

SEQ ID NO: 13105 - protein, 25 aa, synthetic construct
  REGION 1..25: note = Description of Artificial Sequence: Synthetic peptide
PLECIKDLLARAGKASCTLSEQLDF

SEQ ID NO: 13106 - protein, 25 aa, synthetic construct
  REGION 1..25: note = Description of Artificial Sequence: Synthetic peptide
LECIKDLLARAGKASCTLSEQLDFI

SEQ ID NO: 13107 - protein, 25 aa, synthetic construct
  REGION 1..25: note = Description of Artificial Sequence: Synthetic peptide
YPLECIKDLLARAGKASCTLSEQLD

SEQ ID NO: 13108 - protein, 25 aa, synthetic construct
  REGION 1..25: note = Description of Artificial Sequence: Synthetic peptide
IKDLLARAGKASCTLSEQLDFIDTK

SEQ ID NO: 13109 - protein, 25 aa, synthetic construct
  REGION 1..25: note = Description of Artificial Sequence: Synthetic peptide
GYPLECIKDLLARAGKASCTLSEQL

SEQ ID NO: 13110 - protein, 25 aa, synthetic construct
  REGION 1..25: note = Description of Artificial Sequence: Synthetic peptide
CIKDLLARAGKASCTLSEQLDFIDT

SEQ ID NO: 13111 - protein, 25 aa, synthetic construct
  REGION 1..25: note = Description of Artificial Sequence: Synthetic peptide
VTGLFKDCSKVITGLHPTQAPTHLS

SEQ ID NO: 13112 - protein, 25 aa, synthetic construct
  REGION 1..25: note = Description of Artificial Sequence: Synthetic peptide
KRSFIEDLLFNKVTLADAGFIKQYG

SEQ ID NO: 13113 - protein, 25 aa, synthetic construct
  REGION 1..25: note = Description of Artificial Sequence: Synthetic peptide
SKRSFIEDLLFNKVTLADAGFIKQY

SEQ ID NO: 13114 - protein, 25 aa, synthetic construct
  REGION 1..25: note = Description of Artificial Sequence: Synthetic peptide
SFIEDLLFNKVTLADAGFIKQYGDC

SEQ ID NO: 13115 - protein, 25 aa, synthetic construct
  REGION 1..25: note = Description of Artificial Sequence: Synthetic peptide
RSFIEDLLFNKVTLADAGFIKQYGD

SEQ ID NO: 13116 - protein, 25 aa, synthetic construct
  REGION 1..25: note = Description of Artificial Sequence: Synthetic peptide
SNLKPFERDISTEIYQAGSTPCNGV

SEQ ID NO: 13117 - protein, 25 aa, synthetic construct
  REGION 1..25: note = Description of Artificial Sequence: Synthetic peptide
ISFPLCANGQVFGLYKNTCVGSDNV

SEQ ID NO: 13118 - protein, 25 aa, synthetic construct
  REGION 1..25: note = Description of Artificial Sequence: Synthetic peptide
CANGQVFGLYKNTCVGSDNVTDFNA

SEQ ID NO: 13119 - protein, 25 aa, synthetic construct
  REGION 1..25: note = Description of Artificial Sequence: Synthetic peptide
SFPLCANGQVFGLYKNTCVGSDNVT

SEQ ID NO: 13120 - protein, 25 aa, synthetic construct
  REGION 1..25: note = Description of Artificial Sequence: Synthetic peptide
FPLCANGQVFGLYKNTCVGSDNVTD

SEQ ID NO: 13121 - protein, 25 aa, synthetic construct
  REGION 1..25: note = Description of Artificial Sequence: Synthetic peptide
PLCANGQVFGLYKNTCVGSDNVTDF

SEQ ID NO: 13122 - protein, 25 aa, synthetic construct
  REGION 1..25: note = Description of Artificial Sequence: Synthetic peptide
LCANGQVFGLYKNTCVGSDNVTDFN

SEQ ID NO: 13123 - protein, 25 aa, synthetic construct
  REGION 1..25: note = Description of Artificial Sequence: Synthetic peptide
FLGIITTVAAFHQECSLQSCTQHQP

SEQ ID NO: 13124 - protein, 25 aa, synthetic construct
  REGION 1..25: note = Description of Artificial Sequence: Synthetic peptide
VFLGIITTVAAFHQECSLQSCTQHQ

SEQ ID NO: 13125 - protein, 25 aa, synthetic construct
  REGION 1..25: note = Description of Artificial Sequence: Synthetic peptide
YIATNGPLKVGGSCVLSGHNLAKHC

SEQ ID NO: 13126 - protein, 25 aa, synthetic construct
  REGION 1..25: note = Description of Artificial Sequence: Synthetic peptide
ATNGPLKVGGSCVLSGHNLAKHCLH

SEQ ID NO: 13127 - protein, 25 aa, synthetic construct
  REGION 1..25: note = Description of Artificial Sequence: Synthetic peptide
IATNGPLKVGGSCVLSGHNLAKHCL

SEQ ID NO: 13128 - protein, 25 aa, synthetic construct
  REGION 1..25: note = Description of Artificial Sequence: Synthetic peptide
TNGPLKVGGSCVLSGHNLAKHCLHV

SEQ ID NO: 13129 - protein, 25 aa, synthetic construct
  REGION 1..25: note = Description of Artificial Sequence: Synthetic peptide
DYIATNGPLKVGGSCVLSGHNLAKH

SEQ ID NO: 13130 - protein, 25 aa, synthetic construct
  REGION 1..25: note = Description of Artificial Sequence: Synthetic peptide
NGPLKVGGSCVLSGHNLAKHCLHVV

SEQ ID NO: 13131 - protein, 25 aa, synthetic construct
  REGION 1..25: note = Description of Artificial Sequence: Synthetic peptide
LESELVIGAVILRGHLRIAGHHLGR

SEQ ID NO: 13132 - protein, 25 aa, synthetic construct
  REGION 1..25: note = Description of Artificial Sequence: Synthetic peptide
PGNFNKDFYDFAVSKGFFKEGSSVE

SEQ ID NO: 13133 - protein, 25 aa, synthetic construct
  REGION 1..25: note = Description of Artificial Sequence: Synthetic peptide
KPGNFNKDFYDFAVSKGFFKEGSSV

SEQ ID NO: 13134 - protein, 25 aa, synthetic construct
  REGION 1..25: note = Description of Artificial Sequence: Synthetic peptide
NKDFYDFAVSKGFFKEGSSVELKHF

SEQ ID NO: 13135 - protein, 25 aa, synthetic construct
  REGION 1..25: note = Description of Artificial Sequence: Synthetic peptide
FNKDFYDFAVSKGFFKEGSSVELKH

SEQ ID NO: 13136 - protein, 25 aa, synthetic construct
  REGION 1..25: note = Description of Artificial Sequence: Synthetic peptide
NFNKDFYDFAVSKGFFKEGSSVELK

SEQ ID NO: 13137 - protein, 25 aa, synthetic construct
  REGION 1..25: note = Description of Artificial Sequence: Synthetic peptide
INCQEPKLGSLVVRCSFYEDFLEYH

SEQ ID NO: 13138 - protein, 25 aa, synthetic construct
  REGION 1..25: note = Description of Artificial Sequence: Synthetic peptide
NCQEPKLGSLVVRCSFYEDFLEYHD

SEQ ID NO: 13139 - protein, 25 aa, synthetic construct
  REGION 1..25: note = Description of Artificial Sequence: Synthetic peptide
ANGQVFGLYKNTCVGSDNVTDFNAI

SEQ ID NO: 13140 - protein, 25 aa, synthetic construct
  REGION 1..25: note = Description of Artificial Sequence: Synthetic peptide
LPFTINCQEPKLGSLVVRCSFYEDF

SEQ ID NO: 13141 - protein, 25 aa, synthetic construct
  REGION 1..25: note = Description of Artificial Sequence: Synthetic peptide
LACFVLAAVYRINWITGGIAIAMAC

SEQ ID NO: 13142 - protein, 25 aa, synthetic construct
  REGION 1..25: note = Description of Artificial Sequence: Synthetic peptide
TLACFVLAAVYRINWITGGIAIAMA

SEQ ID NO: 13143 - protein, 25 aa, synthetic construct
  REGION 1..25: note = Description of Artificial Sequence: Synthetic peptide
QKRTATKAYNVTQAFGRRGPEQTQG

SEQ ID NO: 13144 - protein, 25 aa, synthetic construct
  REGION 1..25: note = Description of Artificial Sequence: Synthetic peptide
RTATKAYNVTQAFGRRGPEQTQGNF

SEQ ID NO: 13145 - protein, 25 aa, synthetic construct
  REGION 1..25: note = Description of Artificial Sequence: Synthetic peptide
RQKRTATKAYNVTQAFGRRGPEQTQ

SEQ ID NO: 13146 - protein, 25 aa, synthetic construct
  REGION 1..25: note = Description of Artificial Sequence: Synthetic peptide
KRTATKAYNVTQAFGRRGPEQTQGN

SEQ ID NO: 13147 - protein, 25 aa, synthetic construct
  REGION 1..25: note = Description of Artificial Sequence: Synthetic peptide
TEKWESGVKDCVVLHSYFTSDYYQL

SEQ ID NO: 13148 - protein, 25 aa, synthetic construct
  REGION 1..25: note = Description of Artificial Sequence: Synthetic peptide
YTEKWESGVKDCVVLHSYFTSDYYQ

SEQ ID NO: 13149 - protein, 25 aa, synthetic construct
  REGION 1..25: note = Description of Artificial Sequence: Synthetic peptide
NDKVAGFAKFLKTNCCRFQEKDEDD

SEQ ID NO: 13150 - protein, 25 aa, synthetic construct
  REGION 1..25: note = Description of Artificial Sequence: Synthetic peptide
GVEHVTFFIYNKIVDEPEEHVQIHT

SEQ ID NO: 13151 - protein, 25 aa, synthetic construct
  REGION 1..25: note = Description of Artificial Sequence: Synthetic peptide
TDTGVEHVTFFIYNKIVDEPEEHVQ

SEQ ID NO: 13152 - protein, 25 aa, synthetic construct
  REGION 1..25: note = Description of Artificial Sequence: Synthetic peptide
TGVEHVTFFIYNKIVDEPEEHVQIH

SEQ ID NO: 13153 - protein, 25 aa, synthetic construct
  REGION 1..25: note = Description of Artificial Sequence: Synthetic peptide
DTGVEHVTFFIYNKIVDEPEEHVQI

SEQ ID NO: 13154 - protein, 25 aa, synthetic construct
  REGION 1..25: note = Description of Artificial Sequence: Synthetic peptide
VEHVTFFIYNKIVDEPEEHVQIHTI

SEQ ID NO: 13155 - protein, 25 aa, synthetic construct
  REGION 1..25: note = Description of Artificial Sequence: Synthetic peptide
TSRYWEPEFYEAMYTPHTVLQAVGA

SEQ ID NO: 13156 - protein, 25 aa, synthetic construct
  REGION 1..25: note = Description of Artificial Sequence: Synthetic peptide
DNTSRYWEPEFYEAMYTPHTVLQAV

SEQ ID NO: 13157 - protein, 25 aa, synthetic construct
  REGION 1..25: note = Description of Artificial Sequence: Synthetic peptide
NTSRYWEPEFYEAMYTPHTVLQAVG

SEQ ID NO: 13158 - protein, 25 aa, synthetic construct
  REGION 1..25: note = Description of Artificial Sequence: Synthetic peptide
SRYWEPEFYEAMYTPHTVLQAVGAC

SEQ ID NO: 13159 - protein, 25 aa, synthetic construct
  REGION 1..25: note = Description of Artificial Sequence: Synthetic peptide
YWEPEFYEAMYTPHTVLQAVGACVL

SEQ ID NO: 13160 - protein, 25 aa, synthetic construct
  REGION 1..25: note = Description of Artificial Sequence: Synthetic peptide
RYWEPEFYEAMYTPHTVLQAVGACV

SEQ ID NO: 13161 - protein, 25 aa, synthetic construct
  REGION 1..25: note = Description of Artificial Sequence: Synthetic peptide
VYRGTTTYKLNVGDYFVLTSHTVMP

SEQ ID NO: 13162 - protein, 25 aa, synthetic construct
  REGION 1..25: note = Description of Artificial Sequence: Synthetic peptide
TGKIADYNYKLPDDFTGCVIAWNSN

SEQ ID NO: 13163 - protein, 25 aa, synthetic construct
  REGION 1..25: note = Description of Artificial Sequence: Synthetic peptide
KFLVFLGIITTVAAFHQECSLQSCT

SEQ ID NO: 13164 - protein, 25 aa, synthetic construct
  REGION 1..25: note = Description of Artificial Sequence: Synthetic peptide
HEVLLAPLLSAGIFGADPIHSLRVC

SEQ ID NO: 13165 - protein, 25 aa, synthetic construct
  REGION 1..25: note = Description of Artificial Sequence: Synthetic peptide
FNQHEVLLAPLLSAGIFGADPIHSL

SEQ ID NO: 13166 - protein, 25 aa, synthetic construct
  REGION 1..25: note = Description of Artificial Sequence: Synthetic peptide
LAPLLSAGIFGADPIHSLRVCVDTV

SEQ ID NO: 13167 - protein, 25 aa, synthetic construct
  REGION 1..25: note = Description of Artificial Sequence: Synthetic peptide
EVLLAPLLSAGIFGADPIHSLRVCV

SEQ ID NO: 13168 - protein, 25 aa, synthetic construct
  REGION 1..25: note = Description of Artificial Sequence: Synthetic peptide
NQHEVLLAPLLSAGIFGADPIHSLR

SEQ ID NO: 13169 - protein, 25 aa, synthetic construct
  REGION 1..25: note = Description of Artificial Sequence: Synthetic peptide
ENSYTTTIKPVTYKLDGVVCTEIDP

SEQ ID NO: 13170 - protein, 25 aa, synthetic construct
  REGION 1..25: note = Description of Artificial Sequence: Synthetic peptide
VLLAPLLSAGIFGADPIHSLRVCVD

SEQ ID NO: 13171 - protein, 25 aa, synthetic construct
  REGION 1..25: note = Description of Artificial Sequence: Synthetic peptide
LLAPLLSAGIFGADPIHSLRVCVDT

SEQ ID NO: 13172 - protein, 25 aa, synthetic construct
  REGION 1..25: note = Description of Artificial Sequence: Synthetic peptide
QHEVLLAPLLSAGIFGADPIHSLRV

SEQ ID NO: 13173 - protein, 25 aa, synthetic construct
  REGION 1..25: note = Description of Artificial Sequence: Synthetic peptide
CYKRNRATRVECTTIVNGVRRSFYV

SEQ ID NO: 13174 - protein, 25 aa, synthetic construct
  REGION 1..25: note = Description of Artificial Sequence: Synthetic peptide
FRVYSSANNCTFEYVSQPFLMDLEG

SEQ ID NO: 13175 - protein, 25 aa, synthetic construct
  REGION 1..25: note = Description of Artificial Sequence: Synthetic peptide
KTTLPVNVAFELWAKRNIKPVPEVK

SEQ ID NO: 13176 - protein, 25 aa, synthetic construct
  REGION 1..25: note = Description of Artificial Sequence: Synthetic peptide
TTLPVNVAFELWAKRNIKPVPEVKI

SEQ ID NO: 13177 - protein, 25 aa, synthetic construct
  REGION 1..25: note = Description of Artificial Sequence: Synthetic peptide
IPARARVECFDKFKVNSTLEQYVFC

SEQ ID NO: 13178 - protein, 25 aa, synthetic construct
  REGION 1..25: note = Description of Artificial Sequence: Synthetic peptide
SIKNFKSVLYYQNNVFMSEAKCWTE

SEQ ID NO: 13179 - protein, 25 aa, synthetic construct
  REGION 1..25: note = Description of Artificial Sequence: Synthetic peptide
FKSVLYYQNNVFMSEAKCWTETDLT

SEQ ID NO: 13180 - protein, 25 aa, synthetic construct
  REGION 1..25: note = Description of Artificial Sequence: Synthetic peptide
ASIKNFKSVLYYQNNVFMSEAKCWT

SEQ ID NO: 13181 - protein, 25 aa, synthetic construct
  REGION 1..25: note = Description of Artificial Sequence: Synthetic peptide
KNFKSVLYYQNNVFMSEAKCWTETD

SEQ ID NO: 13182 - protein, 25 aa, synthetic construct
  REGION 1..25: note = Description of Artificial Sequence: Synthetic peptide
NFKSVLYYQNNVFMSEAKCWTETDL

SEQ ID NO: 13183 - protein, 25 aa, synthetic construct
  REGION 1..25: note = Description of Artificial Sequence: Synthetic peptide
IKNFKSVLYYQNNVFMSEAKCWTET

SEQ ID NO: 13184 - protein, 25 aa, synthetic construct
  REGION 1..25: note = Description of Artificial Sequence: Synthetic peptide
VASIKNFKSVLYYQNNVFMSEAKCW

SEQ ID NO: 13185 - protein, 25 aa, synthetic construct
  REGION 1..25: note = Description of Artificial Sequence: Synthetic peptide
YEDFQENWNTKHSSGVTRELMRELN

SEQ ID NO: 13186 - protein, 25 aa, synthetic construct
  REGION 1..25: note = Description of Artificial Sequence: Synthetic peptide
EDFQENWNTKHSSGVTRELMRELNG

SEQ ID NO: 13187 - protein, 25 aa, synthetic construct
  REGION 1..25: note = Description of Artificial Sequence: Synthetic peptide
PYEDFQENWNTKHSSGVTRELMREL

SEQ ID NO: 13188 - protein, 25 aa, synthetic construct
  REGION 1..25: note = Description of Artificial Sequence: Synthetic peptide
LSVVNARLRAKHYVYIGDPAQLPAP

SEQ ID NO: 13189 - protein, 25 aa, synthetic construct
  REGION 1..25: note = Description of Artificial Sequence: Synthetic peptide
DTYACWHHSIGFDYVYNPFMIDVQQ

SEQ ID NO: 13190 - protein, 25 aa, synthetic construct
  REGION 1..25: note = Description of Artificial Sequence: Synthetic peptide
TYACWHHSIGFDYVYNPFMIDVQQW

SEQ ID NO: 13191 - protein, 25 aa, synthetic construct
  REGION 1..25: note = Description of Artificial Sequence: Synthetic peptide
LTNNVAFQTVKPGNFNKDFYDFAVS

SEQ ID NO: 13192 - protein, 25 aa, synthetic construct
  REGION 1..25: note = Description of Artificial Sequence: Synthetic peptide
ALTNNVAFQTVKPGNFNKDFYDFAV

SEQ ID NO: 13193 - protein, 25 aa, synthetic construct
  REGION 1..25: note = Description of Artificial Sequence: Synthetic peptide
VFCTVNALPETTADIVVFDEISMAT

SEQ ID NO: 13194 - protein, 25 aa, synthetic construct
  REGION 1..25: note = Description of Artificial Sequence: Synthetic peptide
IPTITQMNLKYAISAKNRARTVAGV

SEQ ID NO: 13195 - protein, 25 aa, synthetic construct
  REGION 1..25: note = Description of Artificial Sequence: Synthetic peptide
LQSADAQSFLNRVCGVSAARLTPCG

SEQ ID NO: 13196 - protein, 25 aa, synthetic construct
  REGION 1..25: note = Description of Artificial Sequence: Synthetic peptide
MLQSADAQSFLNRVCGVSAARLTPC

SEQ ID NO: 13197 - protein, 25 aa, synthetic construct
  REGION 1..25: note = Description of Artificial Sequence: Synthetic peptide
SADAQSFLNRVCGVSAARLTPCGTG

SEQ ID NO: 13198 - protein, 25 aa, synthetic construct
  REGION 1..25: note = Description of Artificial Sequence: Synthetic peptide
QSADAQSFLNRVCGVSAARLTPCGT

SEQ ID NO: 13199 - protein, 25 aa, synthetic construct
  REGION 1..25: note = Description of Artificial Sequence: Synthetic peptide
PMLQSADAQSFLNRVCGVSAARLTP

SEQ ID NO: 13200 - protein, 25 aa, synthetic construct
  REGION 1..25: note = Description of Artificial Sequence: Synthetic peptide
TNNVAFQTVKPGNFNKDFYDFAVSK

SEQ ID NO: 13201 - protein, 25 aa, synthetic construct
  REGION 1..25: note = Description of Artificial Sequence: Synthetic peptide
NNVAFQTVKPGNFNKDFYDFAVSKG

SEQ ID NO: 13202 - protein, 25 aa, synthetic construct
  REGION 1..25: note = Description of Artificial Sequence: Synthetic peptide
NVAFQTVKPGNFNKDFYDFAVSKGF

SEQ ID NO: 13203 - protein, 25 aa, synthetic construct
  REGION 1..25: note = Description of Artificial Sequence: Synthetic peptide
RNVIPTITQMNLKYAISAKNRARTV

SEQ ID NO: 13204 - protein, 25 aa, synthetic construct
  REGION 1..25: note = Description of Artificial Sequence: Synthetic peptide
SASAFFGMSRIGMEVTPSGTWLTYT

SEQ ID NO: 13205 - protein, 25 aa, synthetic construct
  REGION 1..25: note = Description of Artificial Sequence: Synthetic peptide
DVEWKFYDAQPCSDKAYKIEELFYS

SEQ ID NO: 13206 - protein, 25 aa, synthetic construct
  REGION 1..25: note = Description of Artificial Sequence: Synthetic peptide
QADVEWKFYDAQPCSDKAYKIEELF

SEQ ID NO: 13207 - protein, 25 aa, synthetic construct
  REGION 1..25: note = Description of Artificial Sequence: Synthetic peptide
VEWKFYDAQPCSDKAYKIEELFYSY

SEQ ID NO: 13208 - protein, 25 aa, synthetic construct
  REGION 1..25: note = Description of Artificial Sequence: Synthetic peptide
ADVEWKFYDAQPCSDKAYKIEELFY

SEQ ID NO: 13209 - protein, 25 aa, synthetic construct
  REGION 1..25: note = Description of Artificial Sequence: Synthetic peptide
FRELGVVHNQDVNLHSSRLSFKELL

SEQ ID NO: 13210 - protein, 25 aa, synthetic construct
  REGION 1..25: note = Description of Artificial Sequence: Synthetic peptide
RELGVVHNQDVNLHSSRLSFKELLV

SEQ ID NO: 13211 - protein, 25 aa, synthetic construct
  REGION 1..25: note = Description of Artificial Sequence: Synthetic peptide
ELGVVHNQDVNLHSSRLSFKELLVY

SEQ ID NO: 13212 - protein, 25 aa, synthetic construct
  REGION 1..25: note = Description of Artificial Sequence: Synthetic peptide
VVHNQDVNLHSSRLSFKELLVYAAD

SEQ ID NO: 13213 - protein, 25 aa, synthetic construct
  REGION 1..25: note = Description of Artificial Sequence: Synthetic peptide
LGVVHNQDVNLHSSRLSFKELLVYA

SEQ ID NO: 13214 - protein, 25 aa, synthetic construct
  REGION 1..25: note = Description of Artificial Sequence: Synthetic peptide
GVVHNQDVNLHSSRLSFKELLVYAA

SEQ ID NO: 13215 - protein, 25 aa, synthetic construct
  REGION 1..25: note = Description of Artificial Sequence: Synthetic peptide
STFEEAALCTFLLNKEMYLKLRSDV

SEQ ID NO: 13216 - protein, 25 aa, synthetic construct
  REGION 1..25: note = Description of Artificial Sequence: Synthetic peptide
SFSTFEEAALCTFLLNKEMYLKLRS

SEQ ID NO: 13217 - protein, 25 aa, synthetic construct
  REGION 1..25: note = Description of Artificial Sequence: Synthetic peptide
FSTFEEAALCTFLLNKEMYLKLRSD

SEQ ID NO: 13218 - protein, 25 aa, synthetic construct
  REGION 1..25: note = Description of Artificial Sequence: Synthetic peptide
TFEEAALCTFLLNKEMYLKLRSDVL

SEQ ID NO: 13219 - protein, 25 aa, synthetic construct
  REGION 1..25: note = Description of Artificial Sequence: Synthetic peptide
FEEAALCTFLLNKEMYLKLRSDVLL

SEQ ID NO: 13220 - protein, 25 aa, synthetic construct
  REGION 1..25: note = Description of Artificial Sequence: Synthetic peptide
AVTANVNALLSTDGNKIADKYVRNL

SEQ ID NO: 13221 - protein, 25 aa, synthetic construct
  REGION 1..25: note = Description of Artificial Sequence: Synthetic peptide
QAVTANVNALLSTDGNKIADKYVRN

SEQ ID NO: 13222 - protein, 25 aa, synthetic construct
  REGION 1..25: note = Description of Artificial Sequence: Synthetic peptide
SAFVNLKQLPFFYYSDSPCESHGKQ

SEQ ID NO: 13223 - protein, 25 aa, synthetic construct
  REGION 1..25: note = Description of Artificial Sequence: Synthetic peptide
TKRNVIPTITQMNLKYAISAKNRAR

SEQ ID NO: 13224 - protein, 25 aa, synthetic construct
  REGION 1..25: note = Description of Artificial Sequence: Synthetic peptide
YAAVINGDRWFLNRFTTTLNDFNLV

SEQ ID NO: 13225 - protein, 25 aa, synthetic construct
  REGION 1..25: note = Description of Artificial Sequence: Synthetic peptide
AAVINGDRWFLNRFTTTLNDFNLVA

SEQ ID NO: 13226 - protein, 25 aa, synthetic construct
  REGION 1..25: note = Description of Artificial Sequence: Synthetic peptide
AVINGDRWFLNRFTTTLNDFNLVAM

SEQ ID NO: 13227 - protein, 25 aa, synthetic construct
  REGION 1..25: note = Description of Artificial Sequence: Synthetic peptide
WLYAAVINGDRWFLNRFTTTLNDFN

SEQ ID NO: 13228 - protein, 25 aa, synthetic construct
  REGION 1..25: note = Description of Artificial Sequence: Synthetic peptide
LYAAVINGDRWFLNRFTTTLNDFNL

SEQ ID NO: 13229 - protein, 25 aa, synthetic construct
  REGION 1..25: note = Description of Artificial Sequence: Synthetic peptide
ICQAVTANVNALLSTDGNKIADKYV

SEQ ID NO: 13230 - protein, 25 aa, synthetic construct
  REGION 1..25: note = Description of Artificial Sequence: Synthetic peptide
NICQAVTANVNALLSTDGNKIADKY

SEQ ID NO: 13231 - protein, 25 aa, synthetic construct
  REGION 1..25: note = Description of Artificial Sequence: Synthetic peptide
VFNICQAVTANVNALLSTDGNKIAD

SEQ ID NO: 13232 - protein, 25 aa, synthetic construct
  REGION 1..25: note = Description of Artificial Sequence: Synthetic peptide
FNICQAVTANVNALLSTDGNKIADK

SEQ ID NO: 13233 - protein, 25 aa, synthetic construct
  REGION 1..25: note = Description of Artificial Sequence: Synthetic peptide
YIINLIIKNLSKSLTENKYSQLDEE

SEQ ID NO: 13234 - protein, 25 aa, synthetic construct
  REGION 1..25: note = Description of Artificial Sequence: Synthetic peptide
IINLIIKNLSKSLTENKYSQLDEEQ

SEQ ID NO: 13235 - protein, 25 aa, synthetic construct
  REGION 1..25: note = Description of Artificial Sequence: Synthetic peptide
INLIIKNLSKSLTENKYSQLDEEQP

SEQ ID NO: 13236 - protein, 25 aa, synthetic construct
  REGION 1..25: note = Description of Artificial Sequence: Synthetic peptide
DYIINLIIKNLSKSLTENKYSQLDE

SEQ ID NO: 13237 - protein, 25 aa, synthetic construct
  REGION 1..25: note = Description of Artificial Sequence: Synthetic peptide
DFQVTIAEILLIIMRTFKVSIWNLD

SEQ ID NO: 13238 - protein, 25 aa, synthetic construct
  REGION 1..25: note = Description of Artificial Sequence: Synthetic peptide
YFNSVCRLMKTIGPDMFLGTCRRCP

SEQ ID NO: 13239 - protein, 25 aa, synthetic construct
  REGION 1..25: note = Description of Artificial Sequence: Synthetic peptide
EYFNSVCRLMKTIGPDMFLGTCRRC

SEQ ID NO: 13240 - protein, 25 aa, synthetic construct
  REGION 1..25: note = Description of Artificial Sequence: Synthetic peptide
PEYFNSVCRLMKTIGPDMFLGTCRR

SEQ ID NO: 13241 - protein, 25 aa, synthetic construct
  REGION 1..25: note = Description of Artificial Sequence: Synthetic peptide
FNSVCRLMKTIGPDMFLGTCRRCPA

SEQ ID NO: 13242 - protein, 25 aa, synthetic construct
  REGION 1..25: note = Description of Artificial Sequence: Synthetic peptide
PAMHAASGNLLLDKRTTCFSVAALT

SEQ ID NO: 13243 - protein, 25 aa, synthetic construct
  REGION 1..25: note = Description of Artificial Sequence: Synthetic peptide
SVYAWNRKRISNCVADYSVLYNSAS

SEQ ID NO: 13244 - protein, 25 aa, synthetic construct
  REGION 1..25: note = Description of Artificial Sequence: Synthetic peptide
VYAWNRKRISNCVADYSVLYNSASF

SEQ ID NO: 13245 - protein, 25 aa, synthetic construct
  REGION 1..25: note = Description of Artificial Sequence: Synthetic peptide
GTTLPKGFYAEGSRGGSQASSRSSS

SEQ ID NO: 13246 - protein, 25 aa, synthetic construct
  REGION 1..25: note = Description of Artificial Sequence: Synthetic peptide
TTLPKGFYAEGSRGGSQASSRSSSR

SEQ ID NO: 13247 - protein, 25 aa, synthetic construct
  REGION 1..25: note = Description of Artificial Sequence: Synthetic peptide
SQPFLMDLEGKQGNFKNLREFVFKN

SEQ ID NO: 13248 - protein, 25 aa, synthetic construct
  REGION 1..25: note = Description of Artificial Sequence: Synthetic peptide
KYKYFSGAMDTTSYREAACCHLAKA

SEQ ID NO: 13249 - protein, 25 aa, synthetic construct
  REGION 1..25: note = Description of Artificial Sequence: Synthetic peptide
FEPSTQYEYGTEDDYQGKPLEFGAT

SEQ ID NO: 13250 - protein, 25 aa, synthetic construct
  REGION 1..25: note = Description of Artificial Sequence: Synthetic peptide
LYNKYKYFSGAMDTTSYREAACCHL

SEQ ID NO: 13251 - protein, 25 aa, synthetic construct
  REGION 1..25: note = Description of Artificial Sequence: Synthetic peptide
EEFEPSTQYEYGTEDDYQGKPLEFG

SEQ ID NO: 13252 - protein, 25 aa, synthetic construct
  REGION 1..25: note = Description of Artificial Sequence: Synthetic peptide
YNKYKYFSGAMDTTSYREAACCHLA

SEQ ID NO: 13253 - protein, 25 aa, synthetic construct
  REGION 1..25: note = Description of Artificial Sequence: Synthetic peptide
EEEFEPSTQYEYGTEDDYQGKPLEF

SEQ ID NO: 13254 - protein, 25 aa, synthetic construct
  REGION 1..25: note = Description of Artificial Sequence: Synthetic peptide
YKYFSGAMDTTSYREAACCHLAKAL

SEQ ID NO: 13255 - protein, 25 aa, synthetic construct
  REGION 1..25: note = Description of Artificial Sequence: Synthetic peptide
EEEEFEPSTQYEYGTEDDYQGKPLE

SEQ ID NO: 13256 - protein, 25 aa, synthetic construct
  REGION 1..25: note = Description of Artificial Sequence: Synthetic peptide
ALYNKYKYFSGAMDTTSYREAACCH

SEQ ID NO: 13257 - protein, 25 aa, synthetic construct
  REGION 1..25: note = Description of Artificial Sequence: Synthetic peptide
EFEPSTQYEYGTEDDYQGKPLEFGA

SEQ ID NO: 13258 - protein, 25 aa, synthetic construct
  REGION 1..25: note = Description of Artificial Sequence: Synthetic peptide
NKYKYFSGAMDTTSYREAACCHLAK

SEQ ID NO: 13259 - protein, 25 aa, synthetic construct
  REGION 1..25: note = Description of Artificial Sequence: Synthetic peptide
GNYNYLYRLFRKSNLKPFERDISTE

SEQ ID NO: 13260 - protein, 25 aa, synthetic construct
  REGION 1..25: note = Description of Artificial Sequence: Synthetic peptide
KKRWQLALSKGVHFVCNLLLLFVTV

SEQ ID NO: 13261 - protein, 25 aa, synthetic construct
  REGION 1..25: note = Description of Artificial Sequence: Synthetic peptide
TRQVVNVVTTKIALKGGKIVNNWLK

SEQ ID NO: 13262 - protein, 25 aa, synthetic construct
  REGION 1..25: note = Description of Artificial Sequence: Synthetic peptide
LVDFQVTIAEILLIIMRTFKVSIWN

SEQ ID NO: 13263 - protein, 25 aa, synthetic construct
  REGION 1..25: note = Description of Artificial Sequence: Synthetic peptide
AASGNLLLDKRTTCFSVAALTNNVA

SEQ ID NO: 13264 - protein, 25 aa, synthetic construct
  REGION 1..25: note = Description of Artificial Sequence: Synthetic peptide
ASGNLLLDKRTTCFSVAALTNNVAF

SEQ ID NO: 13265 - protein, 25 aa, synthetic construct
  REGION 1..25: note = Description of Artificial Sequence: Synthetic peptide
VYYHKNNKSWMESEFRVYSSANNCT

SEQ ID NO: 13266 - protein, 25 aa, synthetic construct
  REGION 1..25: note = Description of Artificial Sequence: Synthetic peptide
FLGVYYHKNNKSWMESEFRVYSSAN

SEQ ID NO: 13267 - protein, 25 aa, synthetic construct
  REGION 1..25: note = Description of Artificial Sequence: Synthetic peptide
YKRDAPAHISTIGVCSMTDIAKKPT

SEQ ID NO: 13268 - protein, 25 aa, synthetic construct
  REGION 1..25: note = Description of Artificial Sequence: Synthetic peptide
DYKRDAPAHISTIGVCSMTDIAKKP

SEQ ID NO: 13269 - protein, 25 aa, synthetic construct
  REGION 1..25: note = Description of Artificial Sequence: Synthetic peptide
TQTTETAHSCNVNRFNVAITRAKVG

SEQ ID NO: 13270 - protein, 25 aa, synthetic construct
  REGION 1..25: note = Description of Artificial Sequence: Synthetic peptide
TTETAHSCNVNRFNVAITRAKVGIL

SEQ ID NO: 13271 - protein, 25 aa, synthetic construct
  REGION 1..25: note = Description of Artificial Sequence: Synthetic peptide
QTTETAHSCNVNRFNVAITRAKVGI

SEQ ID NO: 13272 - protein, 25 aa, synthetic construct
  REGION 1..25: note = Description of Artificial Sequence: Synthetic peptide
KPNELSRVLGLKTLATHGLAAVNSV

SEQ ID NO: 13273 - protein, 25 aa, synthetic construct
  REGION 1..25: note = Description of Artificial Sequence: Synthetic peptide
IKKPNELSRVLGLKTLATHGLAAVN

SEQ ID NO: 13274 - protein, 25 aa, synthetic construct
  REGION 1..25: note = Description of Artificial Sequence: Synthetic peptide
LTIKKPNELSRVLGLKTLATHGLAA

SEQ ID NO: 13275 - protein, 25 aa, synthetic construct
  REGION 1..25: note = Description of Artificial Sequence: Synthetic peptide
TIKKPNELSRVLGLKTLATHGLAAV

SEQ ID NO: 13276 - protein, 25 aa, synthetic construct
  REGION 1..25: note = Description of Artificial Sequence: Synthetic peptide
NELSRVLGLKTLATHGLAAVNSVPW

SEQ ID NO: 13277 - protein, 25 aa, synthetic construct
  REGION 1..25: note = Description of Artificial Sequence: Synthetic peptide
PNELSRVLGLKTLATHGLAAVNSVP

SEQ ID NO: 13278 - protein, 25 aa, synthetic construct
  REGION 1..25: note = Description of Artificial Sequence: Synthetic peptide
SLTIKKPNELSRVLGLKTLATHGLA

SEQ ID NO: 13279 - protein, 25 aa, synthetic construct
  REGION 1..25: note = Description of Artificial Sequence: Synthetic peptide
KKPNELSRVLGLKTLATHGLAAVNS

SEQ ID NO: 13280 - protein, 25 aa, synthetic construct
  REGION 1..25: note = Description of Artificial Sequence: Synthetic peptide
ELSRVLGLKTLATHGLAAVNSVPWD

SEQ ID NO: 13281 - protein, 25 aa, synthetic construct
  REGION 1..25: note = Description of Artificial Sequence: Synthetic peptide
LAYILFTRFFYVLGLAAIMQLFFSY

SEQ ID NO: 13282 - protein, 25 aa, synthetic construct
  REGION 1..25: note = Description of Artificial Sequence: Synthetic peptide
ILFTRFFYVLGLAAIMQLFFSYFAV

SEQ ID NO: 13283 - protein, 25 aa, synthetic construct
  REGION 1..25: note = Description of Artificial Sequence: Synthetic peptide
AYILFTRFFYVLGLAAIMQLFFSYF

SEQ ID NO: 13284 - protein, 25 aa, synthetic construct
  REGION 1..25: note = Description of Artificial Sequence: Synthetic peptide
YILFTRFFYVLGLAAIMQLFFSYFA

SEQ ID NO: 13285 - protein, 25 aa, synthetic construct
  REGION 1..25: note = Description of Artificial Sequence: Synthetic peptide
WFLAYILFTRFFYVLGLAAIMQLFF

SEQ ID NO: 13286 - protein, 25 aa, synthetic construct
  REGION 1..25: note = Description of Artificial Sequence: Synthetic peptide
FLAYILFTRFFYVLGLAAIMQLFFS

SEQ ID NO: 13287 - protein, 25 aa, synthetic construct
  REGION 1..25: note = Description of Artificial Sequence: Synthetic peptide
EWFLAYILFTRFFYVLGLAAIMQLF

SEQ ID NO: 13288 - protein, 25 aa, synthetic construct
  REGION 1..25: note = Description of Artificial Sequence: Synthetic peptide
AEWFLAYILFTRFFYVLGLAAIMQL

SEQ ID NO: 13289 - protein, 25 aa, synthetic construct
  REGION 1..25: note = Description of Artificial Sequence: Synthetic peptide
VAEWFLAYILFTRFFYVLGLAAIMQ

SEQ ID NO: 13290 - protein, 25 aa, synthetic construct
  REGION 1..25: note = Description of Artificial Sequence: Synthetic peptide
DPFLGVYYHKNNKSWMESEFRVYSS

SEQ ID NO: 13291 - protein, 25 aa, synthetic construct
  REGION 1..25: note = Description of Artificial Sequence: Synthetic peptide
QLTGYKKPASRELKVTFFPDLNGDV

SEQ ID NO: 13292 - protein, 25 aa, synthetic construct
  REGION 1..25: note = Description of Artificial Sequence: Synthetic peptide
NQLTGYKKPASRELKVTFFPDLNGD

SEQ ID NO: 13293 - protein, 25 aa, synthetic construct
  REGION 1..25: note = Description of Artificial Sequence: Synthetic peptide
DGKMKDLSPRWYFYYLGTGPEAGLP

SEQ ID NO: 13294 - protein, 25 aa, synthetic construct
  REGION 1..25: note = Description of Artificial Sequence: Synthetic peptide
YICGDSTECSNLLLQYGSFCTQLNR

SEQ ID NO: 13295 - protein, 25 aa, synthetic construct
  REGION 1..25: note = Description of Artificial Sequence: Synthetic peptide
LFNKVTLADAGFIKQYGDCLGDIAA

SEQ ID NO: 13296 - protein, 25 aa, synthetic construct
  REGION 1..25: note = Description of Artificial Sequence: Synthetic peptide
LLFNKVTLADAGFIKQYGDCLGDIA

SEQ ID NO: 13297 - protein, 25 aa, synthetic construct
  REGION 1..25: note = Description of Artificial Sequence: Synthetic peptide
ALVSDVGDSAEVAVKMFDAYVNTFS

SEQ ID NO: 13298 - protein, 25 aa, synthetic construct
  REGION 1..25: note = Description of Artificial Sequence: Synthetic peptide
LVSDVGDSAEVAVKMFDAYVNTFSS

SEQ ID NO: 13299 - protein, 25 aa, synthetic construct
  REGION 1..25: note = Description of Artificial Sequence: Synthetic peptide
VVFVLWAHGFELTSMKYFVKIGPER

SEQ ID NO: 13300 - protein, 25 aa, synthetic construct
  REGION 1..25: note = Description of Artificial Sequence: Synthetic peptide
ILLIIMRTFKVSIWNLDYIINLIIK

SEQ ID NO: 13301 - protein, 25 aa, synthetic construct
  REGION 1..25: note = Description of Artificial Sequence: Synthetic peptide
AEILLIIMRTFKVSIWNLDYIINLI

SEQ ID NO: 13302 - protein, 25 aa, synthetic construct
  REGION 1..25: note = Description of Artificial Sequence: Synthetic peptide
LLIIMRTFKVSIWNLDYIINLIIKN

SEQ ID NO: 13303 - protein, 25 aa, synthetic construct
  REGION 1..25: note = Description of Artificial Sequence: Synthetic peptide
EILLIIMRTFKVSIWNLDYIINLII

SEQ ID NO: 13304 - protein, 25 aa, synthetic construct
  REGION 1..25: note = Description of Artificial Sequence: Synthetic peptide
KCTLKSFTVEKGIYQTSNFRVQPTE

SEQ ID NO: 13305 - protein, 25 aa, synthetic construct
  REGION 1..25: note = Description of Artificial Sequence: Synthetic peptide
DKSVYYTSNPTTFHLDGEVITFDNL

SEQ ID NO: 13306 - protein, 25 aa, synthetic construct
  REGION 1..25: note = Description of Artificial Sequence: Synthetic peptide
IKGLNNLNRGMVLGSLAATVRLQAG

SEQ ID NO: 13307 - protein, 25 aa, synthetic construct
  REGION 1..25: note = Description of Artificial Sequence: Synthetic peptide
STDVVYRAFDIYNDKVAGFAKFLKT

SEQ ID NO: 13308 - protein, 25 aa, synthetic construct
  REGION 1..25: note = Description of Artificial Sequence: Synthetic peptide
SLENVAFNVVNKGHFDGQQGEVPVS

SEQ ID NO: 13309 - protein, 25 aa, synthetic construct
  REGION 1..25: note = Description of Artificial Sequence: Synthetic peptide
LENVAFNVVNKGHFDGQQGEVPVSI

SEQ ID NO: 13310 - protein, 25 aa, synthetic construct
  REGION 1..25: note = Description of Artificial Sequence: Synthetic peptide
SKKPRQKRTATKAYNVTQAFGRRGP

SEQ ID NO: 13311 - protein, 25 aa, synthetic construct
  REGION 1..25: note = Description of Artificial Sequence: Synthetic peptide
ASKKPRQKRTATKAYNVTQAFGRRG

SEQ ID NO: 13312 - protein, 25 aa, synthetic construct
  REGION 1..25: note = Description of Artificial Sequence: Synthetic peptide
LYFIKGLNNLNRGMVLGSLAATVRL

SEQ ID NO: 13313 - protein, 25 aa, synthetic construct
  REGION 1..25: note = Description of Artificial Sequence: Synthetic peptide
YLYFIKGLNNLNRGMVLGSLAATVR

SEQ ID NO: 13314 - protein, 25 aa, synthetic construct
  REGION 1..25: note = Description of Artificial Sequence: Synthetic peptide
DMILSLLSKGRLIIRENNRVVISSD

SEQ ID NO: 13315 - protein, 25 aa, synthetic construct
  REGION 1..25: note = Description of Artificial Sequence: Synthetic peptide
PSGTWLTYTGAIKLDDKDPNFKDQV

SEQ ID NO: 13316 - protein, 25 aa, synthetic construct
  REGION 1..25: note = Description of Artificial Sequence: Synthetic peptide
SRVLGLKTLATHGLAAVNSVPWDTI

SEQ ID NO: 13317 - protein, 25 aa, synthetic construct
  REGION 1..25: note = Description of Artificial Sequence: Synthetic peptide
RVLGLKTLATHGLAAVNSVPWDTIA

SEQ ID NO: 13318 - protein, 25 aa, synthetic construct
  REGION 1..25: note = Description of Artificial Sequence: Synthetic peptide
VLGLKTLATHGLAAVNSVPWDTIAN

SEQ ID NO: 13319 - protein, 25 aa, synthetic construct
  REGION 1..25: note = Description of Artificial Sequence: Synthetic peptide
VICTSEDMLNPNYEDLLIRKSNHNF

SEQ ID NO: 13320 - protein, 25 aa, synthetic construct
  REGION 1..25: note = Description of Artificial Sequence: Synthetic peptide
CTSEDMLNPNYEDLLIRKSNHNFLV

SEQ ID NO: 13321 - protein, 25 aa, synthetic construct
  REGION 1..25: note = Description of Artificial Sequence: Synthetic peptide
ICTSEDMLNPNYEDLLIRKSNHNFL

SEQ ID NO: 13322 - protein, 25 aa, synthetic construct
  REGION 1..25: note = Description of Artificial Sequence: Synthetic peptide
YDNKLKAHKDKSAQCFKMFYKGVIT

SEQ ID NO: 13323 - protein, 25 aa, synthetic construct
  REGION 1..25: note = Description of Artificial Sequence: Synthetic peptide
NLLLLFVTVYSHLLLVAAGLEAPFL

SEQ ID NO: 13324 - protein, 25 aa, synthetic construct
  REGION 1..25: note = Description of Artificial Sequence: Synthetic peptide
VRNLQHRLYECLYRNRDVDTDFVNE

SEQ ID NO: 13325 - protein, 25 aa, synthetic construct
  REGION 1..25: note = Description of Artificial Sequence: Synthetic peptide
ECSNLLLQYGSFCTQLNRALTGIAV

SEQ ID NO: 13326 - protein, 25 aa, synthetic construct
  REGION 1..25: note = Description of Artificial Sequence: Synthetic peptide
VFKNIDGYFKIYSKHTPINLVRDLP

SEQ ID NO: 13327 - protein, 25 aa, synthetic construct
  REGION 1..25: note = Description of Artificial Sequence: Synthetic peptide
REFVFKNIDGYFKIYSKHTPINLVR

SEQ ID NO: 13328 - protein, 25 aa, synthetic construct
  REGION 1..25: note = Description of Artificial Sequence: Synthetic peptide
FVFKNIDGYFKIYSKHTPINLVRDL

SEQ ID NO: 13329 - protein, 25 aa, synthetic construct
  REGION 1..25: note = Description of Artificial Sequence: Synthetic peptide
FKNIDGYFKIYSKHTPINLVRDLPQ

SEQ ID NO: 13330 - protein, 25 aa, synthetic construct
  REGION 1..25: note = Description of Artificial Sequence: Synthetic peptide
EFVFKNIDGYFKIYSKHTPINLVRD

SEQ ID NO: 13331 - protein, 25 aa, synthetic construct
  REGION 1..25: note = Description of Artificial Sequence: Synthetic peptide
LREFVFKNIDGYFKIYSKHTPINLV

SEQ ID NO: 13332 - protein, 25 aa, synthetic construct
  REGION 1..25: note = Description of Artificial Sequence: Synthetic peptide
TPSFKKGAKLLHKPIVWHVNNATNK

SEQ ID NO: 13333 - protein, 25 aa, synthetic construct
  REGION 1..25: note = Description of Artificial Sequence: Synthetic peptide
PSFKKGAKLLHKPIVWHVNNATNKA

SEQ ID NO: 13334 - protein, 25 aa, synthetic construct
  REGION 1..25: note = Description of Artificial Sequence: Synthetic peptide
PNMLRIMASLVLARKHTTCCSLSHR

SEQ ID NO: 13335 - protein, 25 aa, synthetic construct
  REGION 1..25: note = Description of Artificial Sequence: Synthetic peptide
RLRAKHYVYIGDPAQLPAPRTLLTK

SEQ ID NO: 13336 - protein, 25 aa, synthetic construct
  REGION 1..25: note = Description of Artificial Sequence: Synthetic peptide
ARLRAKHYVYIGDPAQLPAPRTLLT

SEQ ID NO: 13337 - protein, 25 aa, synthetic construct
  REGION 1..25: note = Description of Artificial Sequence: Synthetic peptide
LRAKHYVYIGDPAQLPAPRTLLTKG

SEQ ID NO: 13338 - protein, 25 aa, synthetic construct
  REGION 1..25: note = Description of Artificial Sequence: Synthetic peptide
APLIELCVDEAGSKSPIQYIDIGNY

SEQ ID NO: 13339 - protein, 25 aa, synthetic construct
  REGION 1..25: note = Description of Artificial Sequence: Synthetic peptide
LNRYFRLTLGVYDYLVSTQEFRYMN

SEQ ID NO: 13340 - protein, 25 aa, synthetic construct
  REGION 1..25: note = Description of Artificial Sequence: Synthetic peptide
NRYFRLTLGVYDYLVSTQEFRYMNS

SEQ ID NO: 13341 - protein, 25 aa, synthetic construct
  REGION 1..25: note = Description of Artificial Sequence: Synthetic peptide
TSDLATNNLVVMAYITGGVVQLTSQ

SEQ ID NO: 13342 - protein, 25 aa, synthetic construct
  REGION 1..25: note = Description of Artificial Sequence: Synthetic peptide
SNHNFLVQAGNVQLRVIGHSMQNCV

SEQ ID NO: 13343 - protein, 25 aa, synthetic construct
  REGION 1..25: note = Description of Artificial Sequence: Synthetic peptide
NHNFLVQAGNVQLRVIGHSMQNCVL

SEQ ID NO: 13344 - protein, 25 aa, synthetic construct
  REGION 1..25: note = Description of Artificial Sequence: Synthetic peptide
HNFLVQAGNVQLRVIGHSMQNCVLK

SEQ ID NO: 13345 - protein, 25 aa, synthetic construct
  REGION 1..25: note = Description of Artificial Sequence: Synthetic peptide
YRARAGEAANFCALILAYCNKTVGE

SEQ ID NO: 13346 - protein, 25 aa, synthetic construct
  REGION 1..25: note = Description of Artificial Sequence: Synthetic peptide
RARAGEAANFCALILAYCNKTVGEL

SEQ ID NO: 13347 - protein, 25 aa, synthetic construct
  REGION 1..25: note = Description of Artificial Sequence: Synthetic peptide
ARAGEAANFCALILAYCNKTVGELG

SEQ ID NO: 13348 - protein, 25 aa, synthetic construct
  REGION 1..25: note = Description of Artificial Sequence: Synthetic peptide
SCVLSGHNLAKHCLHVVGPNVNKGE

SEQ ID NO: 13349 - protein, 25 aa, synthetic construct
  REGION 1..25: note = Description of Artificial Sequence: Synthetic peptide
CVLSGHNLAKHCLHVVGPNVNKGED

SEQ ID NO: 13350 - protein, 25 aa, synthetic construct
  REGION 1..25: note = Description of Artificial Sequence: Synthetic peptide
TQYEYGTEDDYQGKPLEFGATSAAL

SEQ ID NO: 13351 - protein, 25 aa, synthetic construct
  REGION 1..25: note = Description of Artificial Sequence: Synthetic peptide
GSCVLSGHNLAKHCLHVVGPNVNKG

SEQ ID NO: 13352 - protein, 25 aa, synthetic construct
  REGION 1..25: note = Description of Artificial Sequence: Synthetic peptide
FGPTYLDGADVTKIKPHNSHEGKTF

SEQ ID NO: 13353 - protein, 25 aa, synthetic construct
  REGION 1..25: note = Description of Artificial Sequence: Synthetic peptide
AHISTIGVCSMTDIAKKPTETICAP

SEQ ID NO: 13354 - protein, 25 aa, synthetic construct
  REGION 1..25: note = Description of Artificial Sequence: Synthetic peptide
PAHISTIGVCSMTDIAKKPTETICA

SEQ ID NO: 13355 - protein, 25 aa, synthetic construct
  REGION 1..25: note = Description of Artificial Sequence: Synthetic peptide
SQRGGSYTNDKACPLIAAVITREVG

SEQ ID NO: 13356 - protein, 25 aa, synthetic construct
  REGION 1..25: note = Description of Artificial Sequence: Synthetic peptide
RDVLVRGFGDSVEEVLSEARQHLKD

SEQ ID NO: 13357 - protein, 25 aa, synthetic construct
  REGION 1..25: note = Description of Artificial Sequence: Synthetic peptide
QPELDSFKEELDKYFKNHTSPDVDL

SEQ ID NO: 13358 - protein, 25 aa, synthetic construct
  REGION 1..25: note = Description of Artificial Sequence: Synthetic peptide
VRDVLVRGFGDSVEEVLSEARQHLK

SEQ ID NO: 13359 - protein, 25 aa, synthetic construct
  REGION 1..25: note = Description of Artificial Sequence: Synthetic peptide
LQPELDSFKEELDKYFKNHTSPDVD

SEQ ID NO: 13360 - protein, 25 aa, synthetic construct
  REGION 1..25: note = Description of Artificial Sequence: Synthetic peptide
RNARNGVLITEGSVKGLQPSVGPKQ

SEQ ID NO: 13361 - protein, 25 aa, synthetic construct
  REGION 1..25: note = Description of Artificial Sequence: Synthetic peptide
ARNGVLITEGSVKGLQPSVGPKQAS

SEQ ID NO: 13362 - protein, 25 aa, synthetic construct
  REGION 1..25: note = Description of Artificial Sequence: Synthetic peptide
NARNGVLITEGSVKGLQPSVGPKQA

SEQ ID NO: 13363 - protein, 25 aa, synthetic construct
  REGION 1..25: note = Description of Artificial Sequence: Synthetic peptide
KLDGVVCTEIDPKLDNYYKKDNSYF

SEQ ID NO: 13364 - protein, 25 aa, synthetic construct
  REGION 1..25: note = Description of Artificial Sequence: Synthetic peptide
PTGVHAGTDLEGNFYGPFVDRQTAQ

SEQ ID NO: 13365 - protein, 25 aa, synthetic construct
  REGION 1..25: note = Description of Artificial Sequence: Synthetic peptide
TGVHAGTDLEGNFYGPFVDRQTAQA

SEQ ID NO: 13366 - protein, 25 aa, synthetic construct
  REGION 1..25: note = Description of Artificial Sequence: Synthetic peptide
TIKPVTYKLDGVVCTEIDPKLDNYY

SEQ ID NO: 13367 - protein, 25 aa, synthetic construct
  REGION 1..25: note = Description of Artificial Sequence: Synthetic peptide
YKLDGVVCTEIDPKLDNYYKKDNSY

SEQ ID NO: 13368 - protein, 25 aa, synthetic construct
  REGION 1..25: note = Description of Artificial Sequence: Synthetic peptide
VTYKLDGVVCTEIDPKLDNYYKKDN

SEQ ID NO: 13369 - protein, 25 aa, synthetic construct
  REGION 1..25: note = Description of Artificial Sequence: Synthetic peptide
GVHAGTDLEGNFYGPFVDRQTAQAA

SEQ ID NO: 13370 - protein, 25 aa, synthetic construct
  REGION 1..25: note = Description of Artificial Sequence: Synthetic peptide
IKPVTYKLDGVVCTEIDPKLDNYYK

SEQ ID NO: 13371 - protein, 25 aa, synthetic construct
  REGION 1..25: note = Description of Artificial Sequence: Synthetic peptide
PVTYKLDGVVCTEIDPKLDNYYKKD

SEQ ID NO: 13372 - protein, 25 aa, synthetic construct
  REGION 1..25: note = Description of Artificial Sequence: Synthetic peptide
KPVTYKLDGVVCTEIDPKLDNYYKK

SEQ ID NO: 13373 - protein, 25 aa, synthetic construct
  REGION 1..25: note = Description of Artificial Sequence: Synthetic peptide
LDGVVCTEIDPKLDNYYKKDNSYFT

SEQ ID NO: 13374 - protein, 25 aa, synthetic construct
  REGION 1..25: note = Description of Artificial Sequence: Synthetic peptide
SDGTGTIYTELEPPCRFVTDTPKGP

SEQ ID NO: 13375 - protein, 25 aa, synthetic construct
  REGION 1..25: note = Description of Artificial Sequence: Synthetic peptide
TYKLDGVVCTEIDPKLDNYYKKDNS

SEQ ID NO: 13376 - protein, 25 aa, synthetic construct
  REGION 1..25: note = Description of Artificial Sequence: Synthetic peptide
DNALAYYNTTKGGRFVLALLSDLQD

SEQ ID NO: 13377 - protein, 25 aa, synthetic construct
  REGION 1..25: note = Description of Artificial Sequence: Synthetic peptide
KSDGTGTIYTELEPPCRFVTDTPKG

SEQ ID NO: 13378 - protein, 25 aa, synthetic construct
  REGION 1..25: note = Description of Artificial Sequence: Synthetic peptide
TVTLLPAADLDDFSKQLQQSMSSAD

SEQ ID NO: 13379 - protein, 25 aa, synthetic construct
  REGION 1..25: note = Description of Artificial Sequence: Synthetic peptide
HDFFKFRIDGDMVPHISRQRLTKYT

SEQ ID NO: 13380 - protein, 25 aa, synthetic construct
  REGION 1..25: note = Description of Artificial Sequence: Synthetic peptide
IDGDMVPHISRQRLTKYTMADLVYA

SEQ ID NO: 13381 - protein, 25 aa, synthetic construct
  REGION 1..25: note = Description of Artificial Sequence: Synthetic peptide
FAFACPDGVKHVYQLRARSVSPKLF

SEQ ID NO: 13382 - protein, 25 aa, synthetic construct
  REGION 1..25: note = Description of Artificial Sequence: Synthetic peptide
FACPDGVKHVYQLRARSVSPKLFIR

SEQ ID NO: 13383 - protein, 25 aa, synthetic construct
  REGION 1..25: note = Description of Artificial Sequence: Synthetic peptide
ACPDGVKHVYQLRARSVSPKLFIRQ

SEQ ID NO: 13384 - protein, 25 aa, synthetic construct
  REGION 1..25: note = Description of Artificial Sequence: Synthetic peptide
QFAFACPDGVKHVYQLRARSVSPKL

SEQ ID NO: 13385 - protein, 25 aa, synthetic construct
  REGION 1..25: note = Description of Artificial Sequence: Synthetic peptide
AFACPDGVKHVYQLRARSVSPKLFI

SEQ ID NO: 13386 - protein, 25 aa, synthetic construct
  REGION 1..25: note = Description of Artificial Sequence: Synthetic peptide
CPDGVKHVYQLRARSVSPKLFIRQE

SEQ ID NO: 13387 - protein, 25 aa, synthetic construct
  REGION 1..25: note = Description of Artificial Sequence: Synthetic peptide
LDNLRANNTKGSLPINVIVFDGKSK

SEQ ID NO: 13388 - protein, 25 aa, synthetic construct
  REGION 1..25: note = Description of Artificial Sequence: Synthetic peptide
FISPYNSQNAVASKILGLPTQTVDS

SEQ ID NO: 13389 - protein, 25 aa, synthetic construct
  REGION 1..25: note = Description of Artificial Sequence: Synthetic peptide
RKAVFISPYNSQNAVASKILGLPTQ

SEQ ID NO: 13390 - protein, 25 aa, synthetic construct
  REGION 1..25: note = Description of Artificial Sequence: Synthetic peptide
LTRNPAWRKAVFISPYNSQNAVASK

SEQ ID NO: 13391 - protein, 25 aa, synthetic construct
  REGION 1..25: note = Description of Artificial Sequence: Synthetic peptide
AEIPKEEVKPFITESKPSVEQRKQD

SEQ ID NO: 13392 - protein, 25 aa, synthetic construct
  REGION 1..25: note = Description of Artificial Sequence: Synthetic peptide
PKEEVKPFITESKPSVEQRKQDDKK

SEQ ID NO: 13393 - protein, 25 aa, synthetic construct
  REGION 1..25: note = Description of Artificial Sequence: Synthetic peptide
EIPKEEVKPFITESKPSVEQRKQDD

SEQ ID NO: 13394 - protein, 25 aa, synthetic construct
  REGION 1..25: note = Description of Artificial Sequence: Synthetic peptide
KIAEIPKEEVKPFITESKPSVEQRK

SEQ ID NO: 13395 - protein, 25 aa, synthetic construct
  REGION 1..25: note = Description of Artificial Sequence: Synthetic peptide
KEEVKPFITESKPSVEQRKQDDKKI

SEQ ID NO: 13396 - protein, 25 aa, synthetic construct
  REGION 1..25: note = Description of Artificial Sequence: Synthetic peptide
IPKEEVKPFITESKPSVEQRKQDDK

SEQ ID NO: 13397 - protein, 25 aa, synthetic construct
  REGION 1..25: note = Description of Artificial Sequence: Synthetic peptide
IAEIPKEEVKPFITESKPSVEQRKQ

SEQ ID NO: 13398 - protein, 25 aa, synthetic construct
  REGION 1..25: note = Description of Artificial Sequence: Synthetic peptide
EEVKPFITESKPSVEQRKQDDKKIK

SEQ ID NO: 13399 - protein, 25 aa, synthetic construct
  REGION 1..25: note = Description of Artificial Sequence: Synthetic peptide
LRANNTKGSLPINVIVFDGKSKCEE

SEQ ID NO: 13400 - protein, 25 aa, synthetic construct
  REGION 1..25: note = Description of Artificial Sequence: Synthetic peptide
RANNTKGSLPINVIVFDGKSKCEES

SEQ ID NO: 13401 - protein, 25 aa, synthetic construct
  REGION 1..25: note = Description of Artificial Sequence: Synthetic peptide
VVLSFELLHAPATVCGPKKSTNLVK

SEQ ID NO: 13402 - protein, 25 aa, synthetic construct
  REGION 1..25: note = Description of Artificial Sequence: Synthetic peptide
QNAVVKIYCPACHNSEVGPEHSLAE

SEQ ID NO: 13403 - protein, 25 aa, synthetic construct
  REGION 1..25: note = Description of Artificial Sequence: Synthetic peptide
YLPQNAVVKIYCPACHNSEVGPEHS

SEQ ID NO: 13404 - protein, 25 aa, synthetic construct
  REGION 1..25: note = Description of Artificial Sequence: Synthetic peptide
PQNAVVKIYCPACHNSEVGPEHSLA

SEQ ID NO: 13405 - protein, 25 aa, synthetic construct
  REGION 1..25: note = Description of Artificial Sequence: Synthetic peptide
LPQNAVVKIYCPACHNSEVGPEHSL

SEQ ID NO: 13406 - protein, 25 aa, synthetic construct
  REGION 1..25: note = Description of Artificial Sequence: Synthetic peptide
ESKPSVEQRKQDDKKIKACVEEVTT

SEQ ID NO: 13407 - protein, 25 aa, synthetic construct
  REGION 1..25: note = Description of Artificial Sequence: Synthetic peptide
TESKPSVEQRKQDDKKIKACVEEVT

SEQ ID NO: 13408 - protein, 25 aa, synthetic construct
  REGION 1..25: note = Description of Artificial Sequence: Synthetic peptide
RRSFYVYANGGKGFCKLHNWNCVNC

SEQ ID NO: 13409 - protein, 25 aa, synthetic construct
  REGION 1..25: note = Description of Artificial Sequence: Synthetic peptide
ITGRLQSLQTYVTQQLIRAAEIRAS

SEQ ID NO: 13410 - protein, 25 aa, synthetic construct
  REGION 1..25: note = Description of Artificial Sequence: Synthetic peptide
GDEVRQIAPGQTGKIADYNYKLPDD

SEQ ID NO: 13411 - protein, 25 aa, synthetic construct
  REGION 1..25: note = Description of Artificial Sequence: Synthetic peptide
DEVRQIAPGQTGKIADYNYKLPDDF

SEQ ID NO: 13412 - protein, 25 aa, synthetic construct
  REGION 1..25: note = Description of Artificial Sequence: Synthetic peptide
CVSFCYMHHMELPTGVHAGTDLEGN

SEQ ID NO: 13413 - protein, 25 aa, synthetic construct
  REGION 1..25: note = Description of Artificial Sequence: Synthetic peptide
VGLMWLSYFIASFRLFARTRSMWSF

SEQ ID NO: 13414 - protein, 25 aa, synthetic construct
  REGION 1..25: note = Description of Artificial Sequence: Synthetic peptide
LVGLMWLSYFIASFRLFARTRSMWS

SEQ ID NO: 13415 - protein, 25 aa, synthetic construct
  REGION 1..25: note = Description of Artificial Sequence: Synthetic peptide
LVIGAVILRGHLRIAGHHLGRCDIK

SEQ ID NO: 13416 - protein, 25 aa, synthetic construct
  REGION 1..25: note = Description of Artificial Sequence: Synthetic peptide
ELVIGAVILRGHLRIAGHHLGRCDI

SEQ ID NO: 13417 - protein, 25 aa, synthetic construct
  REGION 1..25: note = Description of Artificial Sequence: Synthetic peptide
VIGAVILRGHLRIAGHHLGRCDIKD

SEQ ID NO: 13418 - protein, 25 aa, synthetic construct
  REGION 1..25: note = Description of Artificial Sequence: Synthetic peptide
IGAVILRGHLRIAGHHLGRCDIKDL

SEQ ID NO: 13419 - protein, 25 aa, synthetic construct
  REGION 1..25: note = Description of Artificial Sequence: Synthetic peptide
CPACHNSEVGPEHSLAEYHNESGLK

SEQ ID NO: 13420 - protein, 25 aa, synthetic construct
  REGION 1..25: note = Description of Artificial Sequence: Synthetic peptide
YCPACHNSEVGPEHSLAEYHNESGL

SEQ ID NO: 13421 - protein, 25 aa, synthetic construct
  REGION 1..25: note = Description of Artificial Sequence: Synthetic peptide
AVVKIYCPACHNSEVGPEHSLAEYH

SEQ ID NO: 13422 - protein, 25 aa, synthetic construct
  REGION 1..25: note = Description of Artificial Sequence: Synthetic peptide
IYCPACHNSEVGPEHSLAEYHNESG

SEQ ID NO: 13423 - protein, 25 aa, synthetic construct
  REGION 1..25: note = Description of Artificial Sequence: Synthetic peptide
VVKIYCPACHNSEVGPEHSLAEYHN

SEQ ID NO: 13424 - protein, 25 aa, synthetic construct
  REGION 1..25: note = Description of Artificial Sequence: Synthetic peptide
VKIYCPACHNSEVGPEHSLAEYHNE

SEQ ID NO: 13425 - protein, 25 aa, synthetic construct
  REGION 1..25: note = Description of Artificial Sequence: Synthetic peptide
KIYCPACHNSEVGPEHSLAEYHNES

SEQ ID NO: 13426 - protein, 25 aa, synthetic construct
  REGION 1..25: note = Description of Artificial Sequence: Synthetic peptide
EAEVQIDRLITGRLQSLQTYVTQQL

SEQ ID NO: 13427 - protein, 25 aa, synthetic construct
  REGION 1..25: note = Description of Artificial Sequence: Synthetic peptide
AEVQIDRLITGRLQSLQTYVTQQLI

SEQ ID NO: 13428 - protein, 25 aa, synthetic construct
  REGION 1..25: note = Description of Artificial Sequence: Synthetic peptide
VEAEVQIDRLITGRLQSLQTYVTQQ

SEQ ID NO: 13429 - protein, 25 aa, synthetic construct
  REGION 1..25: note = Description of Artificial Sequence: Synthetic peptide
KDLLARAGKASCTLSEQLDFIDTKR

SEQ ID NO: 13430 - protein, 25 aa, synthetic construct
  REGION 1..25: note = Description of Artificial Sequence: Synthetic peptide
TTTIQTIVEVQPQLEMELTPVVQTI

SEQ ID NO: 13431 - protein, 25 aa, synthetic construct
  REGION 1..25: note = Description of Artificial Sequence: Synthetic peptide
EDNQTTTIQTIVEVQPQLEMELTPV

SEQ ID NO: 13432 - protein, 25 aa, synthetic construct
  REGION 1..25: note = Description of Artificial Sequence: Synthetic peptide
DNQTTTIQTIVEVQPQLEMELTPVV

SEQ ID NO: 13433 - protein, 25 aa, synthetic construct
  REGION 1..25: note = Description of Artificial Sequence: Synthetic peptide
DLLARAGKASCTLSEQLDFIDTKRG

SEQ ID NO: 13434 - protein, 25 aa, synthetic construct
  REGION 1..25: note = Description of Artificial Sequence: Synthetic peptide
SEARQHLKDGTCGLVEVEKGVLPQL

SEQ ID NO: 13435 - protein, 25 aa, synthetic construct
  REGION 1..25: note = Description of Artificial Sequence: Synthetic peptide
QTTTIQTIVEVQPQLEMELTPVVQT

SEQ ID NO: 13436 - protein, 25 aa, synthetic construct
  REGION 1..25: note = Description of Artificial Sequence: Synthetic peptide
LLARAGKASCTLSEQLDFIDTKRGV

SEQ ID NO: 13437 - protein, 25 aa, synthetic construct
  REGION 1..25: note = Description of Artificial Sequence: Synthetic peptide
NQTTTIQTIVEVQPQLEMELTPVVQ

SEQ ID NO: 13438 - protein, 25 aa, synthetic construct
  REGION 1..25: note = Description of Artificial Sequence: Synthetic peptide
TSDYYQLYSTQLSTDTGVEHVTFFI

SEQ ID NO: 13439 - protein, 25 aa, synthetic construct
  REGION 1..25: note = Description of Artificial Sequence: Synthetic peptide
KKVDGVVQQLPETYFTQSRNLQEFK

SEQ ID NO: 13440 - protein, 25 aa, synthetic construct
  REGION 1..25: note = Description of Artificial Sequence: Synthetic peptide
KVDGVVQQLPETYFTQSRNLQEFKP

SEQ ID NO: 13441 - protein, 25 aa, synthetic construct
  REGION 1..25: note = Description of Artificial Sequence: Synthetic peptide
ADIVVFDEISMATNYDLSVVNARLR

SEQ ID NO: 13442 - protein, 25 aa, synthetic construct
  REGION 1..25: note = Description of Artificial Sequence: Synthetic peptide
DSLSSTASALGKLQDVVNQNAQALN

SEQ ID NO: 13443 - protein, 25 aa, synthetic construct
  REGION 1..25: note = Description of Artificial Sequence: Synthetic peptide
QDSLSSTASALGKLQDVVNQNAQAL

SEQ ID NO: 13444 - protein, 25 aa, synthetic construct
  REGION 1..25: note = Description of Artificial Sequence: Synthetic peptide
TGVLTESNKKFLPFQQFGRDIADTT

SEQ ID NO: 13445 - protein, 25 aa, synthetic construct
  REGION 1..25: note = Description of Artificial Sequence: Synthetic peptide
LTESNKKFLPFQQFGRDIADTTDAV

SEQ ID NO: 13446 - protein, 25 aa, synthetic construct
  REGION 1..25: note = Description of Artificial Sequence: Synthetic peptide
TESNKKFLPFQQFGRDIADTTDAVR

SEQ ID NO: 13447 - protein, 25 aa, synthetic construct
  REGION 1..25: note = Description of Artificial Sequence: Synthetic peptide
VLTESNKKFLPFQQFGRDIADTTDA

SEQ ID NO: 13448 - protein, 25 aa, synthetic construct
  REGION 1..25: note = Description of Artificial Sequence: Synthetic peptide
ESNKKFLPFQQFGRDIADTTDAVRD

SEQ ID NO: 13449 - protein, 25 aa, synthetic construct
  REGION 1..25: note = Description of Artificial Sequence: Synthetic peptide
GVLTESNKKFLPFQQFGRDIADTTD

SEQ ID NO: 13450 - protein, 25 aa, synthetic construct
  REGION 1..25: note = Description of Artificial Sequence: Synthetic peptide
QITISSFKWDLTAFGLVAEWFLAYI

SEQ ID NO: 13451 - protein, 25 aa, synthetic construct
  REGION 1..25: note = Description of Artificial Sequence: Synthetic peptide
ETIQITISSFKWDLTAFGLVAEWFL

SEQ ID NO: 13452 - protein, 25 aa, synthetic construct
  REGION 1..25: note = Description of Artificial Sequence: Synthetic peptide
LETIQITISSFKWDLTAFGLVAEWF

SEQ ID NO: 13453 - protein, 25 aa, synthetic construct
  REGION 1..25: note = Description of Artificial Sequence: Synthetic peptide
IQITISSFKWDLTAFGLVAEWFLAY

SEQ ID NO: 13454 - protein, 25 aa, synthetic construct
  REGION 1..25: note = Description of Artificial Sequence: Synthetic peptide
SLETIQITISSFKWDLTAFGLVAEW

SEQ ID NO: 13455 - protein, 25 aa, synthetic construct
  REGION 1..25: note = Description of Artificial Sequence: Synthetic peptide
TIQITISSFKWDLTAFGLVAEWFLA

SEQ ID NO: 13456 - protein, 25 aa, synthetic construct
  REGION 1..25: note = Description of Artificial Sequence: Synthetic peptide
ALLLLDRLNQLESKMSGKGQQQQGQ

SEQ ID NO: 13457 - protein, 25 aa, synthetic construct
  REGION 1..25: note = Description of Artificial Sequence: Synthetic peptide
LALLLLDRLNQLESKMSGKGQQQQG

SEQ ID NO: 13458 - protein, 25 aa, synthetic construct
  REGION 1..25: note = Description of Artificial Sequence: Synthetic peptide
LGKLQDVVNQNAQALNTLVKQLSSN

SEQ ID NO: 13459 - protein, 25 aa, synthetic construct
  REGION 1..25: note = Description of Artificial Sequence: Synthetic peptide
PPALQDAYYRARAGEAANFCALILA

SEQ ID NO: 13460 - protein, 25 aa, synthetic construct
  REGION 1..25: note = Description of Artificial Sequence: Synthetic peptide
LKFNPPALQDAYYRARAGEAANFCA

SEQ ID NO: 13461 - protein, 25 aa, synthetic construct
  REGION 1..25: note = Description of Artificial Sequence: Synthetic peptide
NPPALQDAYYRARAGEAANFCALIL

SEQ ID NO: 13462 - protein, 25 aa, synthetic construct
  REGION 1..25: note = Description of Artificial Sequence: Synthetic peptide
FNPPALQDAYYRARAGEAANFCALI

SEQ ID NO: 13463 - protein, 25 aa, synthetic construct
  REGION 1..25: note = Description of Artificial Sequence: Synthetic peptide
KFNPPALQDAYYRARAGEAANFCAL

SEQ ID NO: 13464 - protein, 25 aa, synthetic construct
  REGION 1..25: note = Description of Artificial Sequence: Synthetic peptide
PALQDAYYRARAGEAANFCALILAY

SEQ ID NO: 13465 - protein, 25 aa, synthetic construct
  REGION 1..25: note = Description of Artificial Sequence: Synthetic peptide
DKNTQEVFAQVKQIYKTPPIKDFGG

SEQ ID NO: 13466 - protein, 25 aa, synthetic construct
  REGION 1..25: note = Description of Artificial Sequence: Synthetic peptide
VGMQKYSTLQGPPGTGKSHFAIGLA

SEQ ID NO: 13467 - protein, 25 aa, synthetic construct
  REGION 1..25: note = Description of Artificial Sequence: Synthetic peptide
GMQKYSTLQGPPGTGKSHFAIGLAL

SEQ ID NO: 13468 - protein, 25 aa, synthetic construct
  REGION 1..25: note = Description of Artificial Sequence: Synthetic peptide
AYYVGYLQPRTFLLKYNENGTITDA

SEQ ID NO: 13469 - protein, 25 aa, synthetic construct
  REGION 1..25: note = Description of Artificial Sequence: Synthetic peptide
DGQVDLFRNARNGVLITEGSVKGLQ

SEQ ID NO: 13470 - protein, 25 aa, synthetic construct
  REGION 1..25: note = Description of Artificial Sequence: Synthetic peptide
LMYKGLPWNVVRIKIVQMLSDTLKN

SEQ ID NO: 13471 - protein, 25 aa, synthetic construct
  REGION 1..25: note = Description of Artificial Sequence: Synthetic peptide
MYKGLPWNVVRIKIVQMLSDTLKNL

SEQ ID NO: 13472 - protein, 25 aa, synthetic construct
  REGION 1..25: note = Description of Artificial Sequence: Synthetic peptide
HYTPSFKKGAKLLHKPIVWHVNNAT

SEQ ID NO: 13473 - protein, 25 aa, synthetic construct
  REGION 1..25: note = Description of Artificial Sequence: Synthetic peptide
YKHYTPSFKKGAKLLHKPIVWHVNN

SEQ ID NO: 13474 - protein, 25 aa, synthetic construct
  REGION 1..25: note = Description of Artificial Sequence: Synthetic peptide
KHYTPSFKKGAKLLHKPIVWHVNNA

SEQ ID NO: 13475 - protein, 25 aa, synthetic construct
  REGION 1..25: note = Description of Artificial Sequence: Synthetic peptide
KVGGSCVLSGHNLAKHCLHVVGPNV

SEQ ID NO: 13476 - protein, 25 aa, synthetic construct
  REGION 1..25: note = Description of Artificial Sequence: Synthetic peptide
PLKVGGSCVLSGHNLAKHCLHVVGP

SEQ ID NO: 13477 - protein, 25 aa, synthetic construct
  REGION 1..25: note = Description of Artificial Sequence: Synthetic peptide
LKVGGSCVLSGHNLAKHCLHVVGPN

SEQ ID NO: 13478 - protein, 25 aa, synthetic construct
  REGION 1..25: note = Description of Artificial Sequence: Synthetic peptide
HPNQEYADVFHLYLQYIRKLHDELT

SEQ ID NO: 13479 - protein, 25 aa, synthetic construct
  REGION 1..25: note = Description of Artificial Sequence: Synthetic peptide
KHPNQEYADVFHLYLQYIRKLHDEL

SEQ ID NO: 13480 - protein, 25 aa, synthetic construct
  REGION 1..25: note = Description of Artificial Sequence: Synthetic peptide
HDELTGHMLDMYSVMLTNDNTSRYW

SEQ ID NO: 13481 - protein, 25 aa, synthetic construct
  REGION 1..25: note = Description of Artificial Sequence: Synthetic peptide
KYTMADLVYALRHFDEGNCDTLKEI

SEQ ID NO: 13482 - protein, 25 aa, synthetic construct
  REGION 1..25: note = Description of Artificial Sequence: Synthetic peptide
TKYTMADLVYALRHFDEGNCDTLKE

SEQ ID NO: 13483 - protein, 25 aa, synthetic construct
  REGION 1..25: note = Description of Artificial Sequence: Synthetic peptide
LTKYTMADLVYALRHFDEGNCDTLK

SEQ ID NO: 13484 - protein, 25 aa, synthetic construct
  REGION 1..25: note = Description of Artificial Sequence: Synthetic peptide
YTMADLVYALRHFDEGNCDTLKEIL

SEQ ID NO: 13485 - protein, 25 aa, synthetic construct
  REGION 1..25: note = Description of Artificial Sequence: Synthetic peptide
QRLTKYTMADLVYALRHFDEGNCDT

SEQ ID NO: 13486 - protein, 25 aa, synthetic construct
  REGION 1..25: note = Description of Artificial Sequence: Synthetic peptide
MADLVYALRHFDEGNCDTLKEILVT

SEQ ID NO: 13487 - protein, 25 aa, synthetic construct
  REGION 1..25: note = Description of Artificial Sequence: Synthetic peptide
TMADLVYALRHFDEGNCDTLKEILV

SEQ ID NO: 13488 - protein, 25 aa, synthetic construct
  REGION 1..25: note = Description of Artificial Sequence: Synthetic peptide
RLTKYTMADLVYALRHFDEGNCDTL

SEQ ID NO: 13489 - protein, 25 aa, synthetic construct
  REGION 1..25: note = Description of Artificial Sequence: Synthetic peptide
YHYQECVRGTTVLLKEPCSSGTYEG

SEQ ID NO: 13490 - protein, 25 aa, synthetic construct
  REGION 1..25: note = Description of Artificial Sequence: Synthetic peptide
YQECVRGTTVLLKEPCSSGTYEGNS

SEQ ID NO: 13491 - protein, 25 aa, synthetic construct
  REGION 1..25: note = Description of Artificial Sequence: Synthetic peptide
QECVRGTTVLLKEPCSSGTYEGNSP

SEQ ID NO: 13492 - protein, 25 aa, synthetic construct
  REGION 1..25: note = Description of Artificial Sequence: Synthetic peptide
HYQECVRGTTVLLKEPCSSGTYEGN

SEQ ID NO: 13493 - protein, 25 aa, synthetic construct
  REGION 1..25: note = Description of Artificial Sequence: Synthetic peptide
LYHYQECVRGTTVLLKEPCSSGTYE

SEQ ID NO: 13494 - protein, 25 aa, synthetic construct
  REGION 1..25: note = Description of Artificial Sequence: Synthetic peptide
VSGTNGTKRFDNPVLPFNDGVYFAS

SEQ ID NO: 13495 - protein, 25 aa, synthetic construct
  REGION 1..25: note = Description of Artificial Sequence: Synthetic peptide
IHVSGTNGTKRFDNPVLPFNDGVYF

SEQ ID NO: 13496 - protein, 25 aa, synthetic construct
  REGION 1..25: note = Description of Artificial Sequence: Synthetic peptide
AIHVSGTNGTKRFDNPVLPFNDGVY

SEQ ID NO: 13497 - protein, 25 aa, synthetic construct
  REGION 1..25: note = Description of Artificial Sequence: Synthetic peptide
GTNGTKRFDNPVLPFNDGVYFASTE

SEQ ID NO: 13498 - protein, 25 aa, synthetic construct
  REGION 1..25: note = Description of Artificial Sequence: Synthetic peptide
TNGTKRFDNPVLPFNDGVYFASTEK

SEQ ID NO: 13499 - protein, 25 aa, synthetic construct
  REGION 1..25: note = Description of Artificial Sequence: Synthetic peptide
HVSGTNGTKRFDNPVLPFNDGVYFA

SEQ ID NO: 13500 - protein, 25 aa, synthetic construct
  REGION 1..25: note = Description of Artificial Sequence: Synthetic peptide
SGTNGTKRFDNPVLPFNDGVYFAST

SEQ ID NO: 13501 - protein, 25 aa, synthetic construct
  REGION 1..25: note = Description of Artificial Sequence: Synthetic peptide
HNQDVNLHSSRLSFKELLVYAADPA

SEQ ID NO: 13502 - protein, 25 aa, synthetic construct
  REGION 1..25: note = Description of Artificial Sequence: Synthetic peptide
GTGVLTESNKKFLPFQQFGRDIADT

SEQ ID NO: 13503 - protein, 25 aa, synthetic construct
  REGION 1..25: note = Description of Artificial Sequence: Synthetic peptide
YSLLLCRMNSRNYIAQVDVVNFNLT

SEQ ID NO: 13504 - protein, 25 aa, synthetic construct
  REGION 1..25: note = Description of Artificial Sequence: Synthetic peptide
HNWNCVNCDTFCAGSTFISDEVARD

SEQ ID NO: 13505 - protein, 25 aa, synthetic construct
  REGION 1..25: note = Description of Artificial Sequence: Synthetic peptide
NCVNCDTFCAGSTFISDEVARDLSL

SEQ ID NO: 13506 - protein, 25 aa, synthetic construct
  REGION 1..25: note = Description of Artificial Sequence: Synthetic peptide
WNCVNCDTFCAGSTFISDEVARDLS

SEQ ID NO: 13507 - protein, 25 aa, synthetic construct
  REGION 1..25: note = Description of Artificial Sequence: Synthetic peptide
NWNCVNCDTFCAGSTFISDEVARDL

SEQ ID NO: 13508 - protein, 25 aa, synthetic construct
  REGION 1..25: note = Description of Artificial Sequence: Synthetic peptide
GYLTSSSKTPEEHFIETISLAGSYK

SEQ ID NO: 13509 - protein, 25 aa, synthetic construct
  REGION 1..25: note = Description of Artificial Sequence: Synthetic peptide
QTLLALHRSYLTPGDSSSGWTAGAA

SEQ ID NO: 13510 - protein, 25 aa, synthetic construct
  REGION 1..25: note = Description of Artificial Sequence: Synthetic peptide
VLQQLRVESSSKLWAQCVQLHNDIL

SEQ ID NO: 13511 - protein, 25 aa, synthetic construct
  REGION 1..25: note = Description of Artificial Sequence: Synthetic peptide
LQQLRVESSSKLWAQCVQLHNDILL

SEQ ID NO: 13512 - protein, 25 aa, synthetic construct
  REGION 1..25: note = Description of Artificial Sequence: Synthetic peptide
QQLRVESSSKLWAQCVQLHNDILLA

SEQ ID NO: 13513 - protein, 25 aa, synthetic construct
  REGION 1..25: note = Description of Artificial Sequence: Synthetic peptide
WLIVGVALLAVFQSASKIITLKKRW

SEQ ID NO: 13514 - protein, 25 aa, synthetic construct
  REGION 1..25: note = Description of Artificial Sequence: Synthetic peptide
LIVGVALLAVFQSASKIITLKKRWQ

SEQ ID NO: 13515 - protein, 25 aa, synthetic construct
  REGION 1..25: note = Description of Artificial Sequence: Synthetic peptide
IVGVALLAVFQSASKIITLKKRWQL

SEQ ID NO: 13516 - protein, 25 aa, synthetic construct
  REGION 1..25: note = Description of Artificial Sequence: Synthetic peptide
GDCEEEEFEPSTQYEYGTEDDYQGK

SEQ ID NO: 13517 - protein, 25 aa, synthetic construct
  REGION 1..25: note = Description of Artificial Sequence: Synthetic peptide
NGLTGTGVLTESNKKFLPFQQFGRD

SEQ ID NO: 13518 - protein, 25 aa, synthetic construct
  REGION 1..25: note = Description of Artificial Sequence: Synthetic peptide
FNGLTGTGVLTESNKKFLPFQQFGR

SEQ ID NO: 13519 - protein, 25 aa, synthetic construct
  REGION 1..25: note = Description of Artificial Sequence: Synthetic peptide
DIVVFDEISMATNYDLSVVNARLRA

SEQ ID NO: 13520 - protein, 25 aa, synthetic construct
  REGION 1..25: note = Description of Artificial Sequence: Synthetic peptide
HLYLQYIRKLHDELTGHMLDMYSVM

SEQ ID NO: 13521 - protein, 25 aa, synthetic construct
  REGION 1..25: note = Description of Artificial Sequence: Synthetic peptide
IQEGVVDYGARFYFYTSKTTVASLI

SEQ ID NO: 13522 - protein, 25 aa, synthetic construct
  REGION 1..25: note = Description of Artificial Sequence: Synthetic peptide
NRATRVECTTIVNGVRRSFYVYANG

SEQ ID NO: 13523 - protein, 25 aa, synthetic construct
  REGION 1..25: note = Description of Artificial Sequence: Synthetic peptide
IKQYGDCLGDIAARDLICAQKFNGL

SEQ ID NO: 13524 - protein, 25 aa, synthetic construct
  REGION 1..25: note = Description of Artificial Sequence: Synthetic peptide
FIKQYGDCLGDIAARDLICAQKFNG

SEQ ID NO: 13525 - protein, 25 aa, synthetic construct
  REGION 1..25: note = Description of Artificial Sequence: Synthetic peptide
FPREGVFVSNGTHWFVTQRNFYEPQ

SEQ ID NO: 13526 - protein, 25 aa, synthetic construct
  REGION 1..25: note = Description of Artificial Sequence: Synthetic peptide
REGVFVSNGTHWFVTQRNFYEPQII

SEQ ID NO: 13527 - protein, 25 aa, synthetic construct
  REGION 1..25: note = Description of Artificial Sequence: Synthetic peptide
PREGVFVSNGTHWFVTQRNFYEPQI

SEQ ID NO: 13528 - protein, 25 aa, synthetic construct
  REGION 1..25: note = Description of Artificial Sequence: Synthetic peptide
YKGIKIQEGVVDYGARFYFYTSKTT

SEQ ID NO: 13529 - protein, 25 aa, synthetic construct
  REGION 1..25: note = Description of Artificial Sequence: Synthetic peptide
KGIKIQEGVVDYGARFYFYTSKTTV

SEQ ID NO: 13530 - protein, 25 aa, synthetic construct
  REGION 1..25: note = Description of Artificial Sequence: Synthetic peptide
AGFIKQYGDCLGDIAARDLICAQKF

SEQ ID NO: 13531 - protein, 25 aa, synthetic construct
  REGION 1..25: note = Description of Artificial Sequence: Synthetic peptide
GFIKQYGDCLGDIAARDLICAQKFN

SEQ ID NO: 13532 - protein, 25 aa, synthetic construct
  REGION 1..25: note = Description of Artificial Sequence: Synthetic peptide
IEFLKRGDKSVYYTSNPTTFHLDGE

SEQ ID NO: 13533 - protein, 25 aa, synthetic construct
  REGION 1..25: note = Description of Artificial Sequence: Synthetic peptide
PKYKFVRIQPGQTFSVLACYNGSPS

SEQ ID NO: 13534 - protein, 25 aa, synthetic construct
  REGION 1..25: note = Description of Artificial Sequence: Synthetic peptide
VKMLCTHTGTGQAITVTPEANMDQE

SEQ ID NO: 13535 - protein, 25 aa, synthetic construct
  REGION 1..25: note = Description of Artificial Sequence: Synthetic peptide
CVKMLCTHTGTGQAITVTPEANMDQ

SEQ ID NO: 13536 - protein, 25 aa, synthetic construct
  REGION 1..25: note = Description of Artificial Sequence: Synthetic peptide
NVANYQKVGMQKYSTLQGPPGTGKS

SEQ ID NO: 13537 - protein, 25 aa, synthetic construct
  REGION 1..25: note = Description of Artificial Sequence: Synthetic peptide
GTAVMSLKEGQINDMILSLLSKGRL

SEQ ID NO: 13538 - protein, 25 aa, synthetic construct
  REGION 1..25: note = Description of Artificial Sequence: Synthetic peptide
DKSAFVNLKQLPFFYYSDSPCESHG

SEQ ID NO: 13539 - protein, 25 aa, synthetic construct
  REGION 1..25: note = Description of Artificial Sequence: Synthetic peptide
NKKDWYDFVENPDILRVYANLGERV

SEQ ID NO: 13540 - protein, 25 aa, synthetic construct
  REGION 1..25: note = Description of Artificial Sequence: Synthetic peptide
TLVATAEAELAKNVSLDNVLSTFIS

SEQ ID NO: 13541 - protein, 25 aa, synthetic construct
  REGION 1..25: note = Description of Artificial Sequence: Synthetic peptide
GGDGKMKDLSPRWYFYYLGTGPEAG

SEQ ID NO: 13542 - protein, 25 aa, synthetic construct
  REGION 1..25: note = Description of Artificial Sequence: Synthetic peptide
MVSLLSVLLSMQGAVDINKLCEEML

SEQ ID NO: 13543 - protein, 25 aa, synthetic construct
  REGION 1..25: note = Description of Artificial Sequence: Synthetic peptide
EKMVSLLSVLLSMQGAVDINKLCEE

SEQ ID NO: 13544 - protein, 25 aa, synthetic construct
  REGION 1..25: note = Description of Artificial Sequence: Synthetic peptide
KMVSLLSVLLSMQGAVDINKLCEEM

SEQ ID NO: 13545 - protein, 25 aa, synthetic construct
  REGION 1..25: note = Description of Artificial Sequence: Synthetic peptide
IIGGAKLKALNLGETFVTHSKGLYR

SEQ ID NO: 13546 - protein, 25 aa, synthetic construct
  REGION 1..25: note = Description of Artificial Sequence: Synthetic peptide
IIIGGAKLKALNLGETFVTHSKGLY

SEQ ID NO: 13547 - protein, 25 aa, synthetic construct
  REGION 1..25: note = Description of Artificial Sequence: Synthetic peptide
SYLFQHANLDSCKRVLNVVCKTCGQ

SEQ ID NO: 13548 - protein, 25 aa, synthetic construct
  REGION 1..25: note = Description of Artificial Sequence: Synthetic peptide
MSYLFQHANLDSCKRVLNVVCKTCG

SEQ ID NO: 13549 - protein, 25 aa, synthetic construct
  REGION 1..25: note = Description of Artificial Sequence: Synthetic peptide
KSPNFSKLINIIIWFLLLSVCLGSL

SEQ ID NO: 13550 - protein, 25 aa, synthetic construct
  REGION 1..25: note = Description of Artificial Sequence: Synthetic peptide
LKSPNFSKLINIIIWFLLLSVCLGS

SEQ ID NO: 13551 - protein, 25 aa, synthetic construct
  REGION 1..25: note = Description of Artificial Sequence: Synthetic peptide
PVCVETKAIVSTIQRKYKGIKIQEG

SEQ ID NO: 13552 - protein, 25 aa, synthetic construct
  REGION 1..25: note = Description of Artificial Sequence: Synthetic peptide
VCVETKAIVSTIQRKYKGIKIQEGV

SEQ ID NO: 13553 - protein, 25 aa, synthetic construct
  REGION 1..25: note = Description of Artificial Sequence: Synthetic peptide
CVETKAIVSTIQRKYKGIKIQEGVV

SEQ ID NO: 13554 - protein, 25 aa, synthetic construct
  REGION 1..25: note = Description of Artificial Sequence: Synthetic peptide
MPVCVETKAIVSTIQRKYKGIKIQE

SEQ ID NO: 13555 - protein, 25 aa, synthetic construct
  REGION 1..25: note = Description of Artificial Sequence: Synthetic peptide
KEMYLKLRSDVLLPLTQYNRYLALY

SEQ ID NO: 13556 - protein, 25 aa, synthetic construct
  REGION 1..25: note = Description of Artificial Sequence: Synthetic peptide
DKAGQKTYERHSLSHFVNLDNLRAN

SEQ ID NO: 13557 - protein, 25 aa, synthetic construct
  REGION 1..25: note = Description of Artificial Sequence: Synthetic peptide
DTTSYREAACCHLAKALNDFSNSGS

SEQ ID NO: 13558 - protein, 25 aa, synthetic construct
  REGION 1..25: note = Description of Artificial Sequence: Synthetic peptide
SYREAACCHLAKALNDFSNSGSDVL

SEQ ID NO: 13559 - protein, 25 aa, synthetic construct
  REGION 1..25: note = Description of Artificial Sequence: Synthetic peptide
TTSYREAACCHLAKALNDFSNSGSD

SEQ ID NO: 13560 - protein, 25 aa, synthetic construct
  REGION 1..25: note = Description of Artificial Sequence: Synthetic peptide
YREAACCHLAKALNDFSNSGSDVLY

SEQ ID NO: 13561 - protein, 25 aa, synthetic construct
  REGION 1..25: note = Description of Artificial Sequence: Synthetic peptide
AGALNKATNNAMQVESDDYIATNGP

SEQ ID NO: 13562 - protein, 25 aa, synthetic construct
  REGION 1..25: note = Description of Artificial Sequence: Synthetic peptide
REAACCHLAKALNDFSNSGSDVLYQ

SEQ ID NO: 13563 - protein, 25 aa, synthetic construct
  REGION 1..25: note = Description of Artificial Sequence: Synthetic peptide
AACCHLAKALNDFSNSGSDVLYQPP

SEQ ID NO: 13564 - protein, 25 aa, synthetic construct
  REGION 1..25: note = Description of Artificial Sequence: Synthetic peptide
TSYREAACCHLAKALNDFSNSGSDV

SEQ ID NO: 13565 - protein, 25 aa, synthetic construct
  REGION 1..25: note = Description of Artificial Sequence: Synthetic peptide
EAACCHLAKALNDFSNSGSDVLYQP

SEQ ID NO: 13566 - protein, 25 aa, synthetic construct
  REGION 1..25: note = Description of Artificial Sequence: Synthetic peptide
SNLLLQYGSFCTQLNRALTGIAVEQ

SEQ ID NO: 13567 - protein, 25 aa, synthetic construct
  REGION 1..25: note = Description of Artificial Sequence: Synthetic peptide
NLLLQYGSFCTQLNRALTGIAVEQD

SEQ ID NO: 13568 - protein, 25 aa, synthetic construct
  REGION 1..25: note = Description of Artificial Sequence: Synthetic peptide
DVLVRGFGDSVEEVLSEARQHLKDG

SEQ ID NO: 13569 - protein, 25 aa, synthetic construct
  REGION 1..25: note = Description of Artificial Sequence: Synthetic peptide
VLVRGFGDSVEEVLSEARQHLKDGT

SEQ ID NO: 13570 - protein, 25 aa, synthetic construct
  REGION 1..25: note = Description of Artificial Sequence: Synthetic peptide
WVPRASANIGCNHTGVVGEGSEGLN

SEQ ID NO: 13571 - protein, 25 aa, synthetic construct
  REGION 1..25: note = Description of Artificial Sequence: Synthetic peptide
YWVPRASANIGCNHTGVVGEGSEGL

SEQ ID NO: 13572 - protein, 25 aa, synthetic construct
  REGION 1..25: note = Description of Artificial Sequence: Synthetic peptide
AYWVPRASANIGCNHTGVVGEGSEG

SEQ ID NO: 13573 - protein, 25 aa, synthetic construct
  REGION 1..25: note = Description of Artificial Sequence: Synthetic peptide
VPRASANIGCNHTGVVGEGSEGLND

SEQ ID NO: 13574 - protein, 25 aa, synthetic construct
  REGION 1..25: note = Description of Artificial Sequence: Synthetic peptide
ETLPTEVLTEEVVLKTGDLQPLEQP

SEQ ID NO: 13575 - protein, 25 aa, synthetic construct
  REGION 1..25: note = Description of Artificial Sequence: Synthetic peptide
ARSEDKRAKVTSAMQTMLFTMLRKL

SEQ ID NO: 13576 - protein, 25 aa, synthetic construct
  REGION 1..25: note = Description of Artificial Sequence: Synthetic peptide
KQARSEDKRAKVTSAMQTMLFTMLR

SEQ ID NO: 13577 - protein, 25 aa, synthetic construct
  REGION 1..25: note = Description of Artificial Sequence: Synthetic peptide
GETLPTEVLTEEVVLKTGDLQPLEQ

SEQ ID NO: 13578 - protein, 25 aa, synthetic construct
  REGION 1..25: note = Description of Artificial Sequence: Synthetic peptide
NSGSDVLYQPPQTSITSAVLQSGFR

SEQ ID NO: 13579 - protein, 25 aa, synthetic construct
  REGION 1..25: note = Description of Artificial Sequence: Synthetic peptide
QARSEDKRAKVTSAMQTMLFTMLRK

SEQ ID NO: 13580 - protein, 25 aa, synthetic construct
  REGION 1..25: note = Description of Artificial Sequence: Synthetic peptide
RSEDKRAKVTSAMQTMLFTMLRKLD

SEQ ID NO: 13581 - protein, 25 aa, synthetic construct
  REGION 1..25: note = Description of Artificial Sequence: Synthetic peptide
TLPTEVLTEEVVLKTGDLQPLEQPT

SEQ ID NO: 13582 - protein, 25 aa, synthetic construct
  REGION 1..25: note = Description of Artificial Sequence: Synthetic peptide
NKCAYWVPRASANIGCNHTGVVGEG

SEQ ID NO: 13583 - protein, 25 aa, synthetic construct
  REGION 1..25: note = Description of Artificial Sequence: Synthetic peptide
HNKCAYWVPRASANIGCNHTGVVGE

SEQ ID NO: 13584 - protein, 25 aa, synthetic construct
  REGION 1..25: note = Description of Artificial Sequence: Synthetic peptide
KHCLHVVGPNVNKGEDIQLLKSAYE

SEQ ID NO: 13585 - protein, 25 aa, synthetic construct
  REGION 1..25: note = Description of Artificial Sequence: Synthetic peptide
GEFKLASHMYCSFYPPDEDEEEGDC

SEQ ID NO: 13586 - protein, 25 aa, synthetic construct
  REGION 1..25: note = Description of Artificial Sequence: Synthetic peptide
SGEFKLASHMYCSFYPPDEDEEEGD

SEQ ID NO: 13587 - protein, 25 aa, synthetic construct
  REGION 1..25: note = Description of Artificial Sequence: Synthetic peptide
SGHNLAKHCLHVVGPNVNKGEDIQL

SEQ ID NO: 13588 - protein, 25 aa, synthetic construct
  REGION 1..25: note = Description of Artificial Sequence: Synthetic peptide
HNLAKHCLHVVGPNVNKGEDIQLLK

SEQ ID NO: 13589 - protein, 25 aa, synthetic construct
  REGION 1..25: note = Description of Artificial Sequence: Synthetic peptide
GHNLAKHCLHVVGPNVNKGEDIQLL

SEQ ID NO: 13590 - protein, 25 aa, synthetic construct
  REGION 1..25: note = Description of Artificial Sequence: Synthetic peptide
IVKTDGTLMIERFVSLAIDAYPLTK

SEQ ID NO: 13591 - protein, 25 aa, synthetic construct
  REGION 1..25: note = Description of Artificial Sequence: Synthetic peptide
VKTDGTLMIERFVSLAIDAYPLTKH

SEQ ID NO: 13592 - protein, 25 aa, synthetic construct
  REGION 1..25: note = Description of Artificial Sequence: Synthetic peptide
DIVKTDGTLMIERFVSLAIDAYPLT

SEQ ID NO: 13593 - protein, 25 aa, synthetic construct
  REGION 1..25: note = Description of Artificial Sequence: Synthetic peptide
NSPFHPLADNKFALTCFSTQFAFAC

SEQ ID NO: 13594 - protein, 25 aa, synthetic construct
  REGION 1..25: note = Description of Artificial Sequence: Synthetic peptide
YSSANNCTFEYVSQPFLMDLEGKQG

SEQ ID NO: 13595 - protein, 25 aa, synthetic construct
  REGION 1..25: note = Description of Artificial Sequence: Synthetic peptide
VYSSANNCTFEYVSQPFLMDLEGKQ

SEQ ID NO: 13596 - protein, 25 aa, synthetic construct
  REGION 1..25: note = Description of Artificial Sequence: Synthetic peptide
HSIGFDYVYNPFMIDVQQWGFTGNL

SEQ ID NO: 13597 - protein, 25 aa, synthetic construct
  REGION 1..25: note = Description of Artificial Sequence: Synthetic peptide
SGDATTAYANSVFNICQAVTANVNA

SEQ ID NO: 13598 - protein, 25 aa, synthetic construct
  REGION 1..25: note = Description of Artificial Sequence: Synthetic peptide
SSGDATTAYANSVFNICQAVTANVN

SEQ ID NO: 13599 - protein, 25 aa, synthetic construct
  REGION 1..25: note = Description of Artificial Sequence: Synthetic peptide
TVDSSQGSEYDYVIFTQTTETAHSC

SEQ ID NO: 13600 - protein, 25 aa, synthetic construct
  REGION 1..25: note = Description of Artificial Sequence: Synthetic peptide
PFHPLADNKFALTCFSTQFAFACPD

SEQ ID NO: 13601 - protein, 25 aa, synthetic construct
  REGION 1..25: note = Description of Artificial Sequence: Synthetic peptide
HPLADNKFALTCFSTQFAFACPDGV

SEQ ID NO: 13602 - protein, 25 aa, synthetic construct
  REGION 1..25: note = Description of Artificial Sequence: Synthetic peptide
LYRNRDVDTDFVNEFYAYLRKHFSM

SEQ ID NO: 13603 - protein, 25 aa, synthetic construct
  REGION 1..25: note = Description of Artificial Sequence: Synthetic peptide
CLYRNRDVDTDFVNEFYAYLRKHFS

SEQ ID NO: 13604 - protein, 25 aa, synthetic construct
  REGION 1..25: note = Description of Artificial Sequence: Synthetic peptide
GWHNMLKTVYSDVENPHLMGWDYPK

SEQ ID NO: 13605 - protein, 25 aa, synthetic construct
  REGION 1..25: note = Description of Artificial Sequence: Synthetic peptide
HNMLKTVYSDVENPHLMGWDYPKCD

SEQ ID NO: 13606 - protein, 25 aa, synthetic construct
  REGION 1..25: note = Description of Artificial Sequence: Synthetic peptide
WHNMLKTVYSDVENPHLMGWDYPKC

SEQ ID NO: 13607 - protein, 25 aa, synthetic construct
  REGION 1..25: note = Description of Artificial Sequence: Synthetic peptide
ADNKFALTCFSTQFAFACPDGVKHV

SEQ ID NO: 13608 - protein, 25 aa, synthetic construct
  REGION 1..25: note = Description of Artificial Sequence: Synthetic peptide
LADNKFALTCFSTQFAFACPDGVKH

SEQ ID NO: 13609 - protein, 25 aa, synthetic construct
  REGION 1..25: note = Description of Artificial Sequence: Synthetic peptide
DNKFALTCFSTQFAFACPDGVKHVY

SEQ ID NO: 13610 - protein, 25 aa, synthetic construct
  REGION 1..25: note = Description of Artificial Sequence: Synthetic peptide
PNCVNCLDDRCILHCANFNVLFSTV

SEQ ID NO: 13611 - protein, 25 aa, synthetic construct
  REGION 1..25: note = Description of Artificial Sequence: Synthetic peptide
IAARDLICAQKFNGLTVLPPLLTDE

SEQ ID NO: 13612 - protein, 25 aa, synthetic construct
  REGION 1..25: note = Description of Artificial Sequence: Synthetic peptide
DCVVLHSYFTSDYYQLYSTQLSTDT

SEQ ID NO: 13613 - protein, 25 aa, synthetic construct
  REGION 1..25: note = Description of Artificial Sequence: Synthetic peptide
KDCVVLHSYFTSDYYQLYSTQLSTD

SEQ ID NO: 13614 - protein, 25 aa, synthetic construct
  REGION 1..25: note = Description of Artificial Sequence: Synthetic peptide
AVDALCEKALKYLPIDKCSRIIPAR

SEQ ID NO: 13615 - protein, 25 aa, synthetic construct
  REGION 1..25: note = Description of Artificial Sequence: Synthetic peptide
PPTSFGPLVRKIFVDGVPFVVSTGY

SEQ ID NO: 13616 - protein, 25 aa, synthetic construct
  REGION 1..25: note = Description of Artificial Sequence: Synthetic peptide
ACSHAAVDALCEKALKYLPIDKCSR

SEQ ID NO: 13617 - protein, 25 aa, synthetic construct
  REGION 1..25: note = Description of Artificial Sequence: Synthetic peptide
HAAVDALCEKALKYLPIDKCSRIIP

SEQ ID NO: 13618 - protein, 25 aa, synthetic construct
  REGION 1..25: note = Description of Artificial Sequence: Synthetic peptide
SHAAVDALCEKALKYLPIDKCSRII

SEQ ID NO: 13619 - protein, 25 aa, synthetic construct
  REGION 1..25: note = Description of Artificial Sequence: Synthetic peptide
CSHAAVDALCEKALKYLPIDKCSRI

SEQ ID NO: 13620 - protein, 25 aa, synthetic construct
  REGION 1..25: note = Description of Artificial Sequence: Synthetic peptide
AAVDALCEKALKYLPIDKCSRIIPA

SEQ ID NO: 13621 - protein, 25 aa, synthetic construct
  REGION 1..25: note = Description of Artificial Sequence: Synthetic peptide
YTACSHAAVDALCEKALKYLPIDKC

SEQ ID NO: 13622 - protein, 25 aa, synthetic construct
  REGION 1..25: note = Description of Artificial Sequence: Synthetic peptide
VYTACSHAAVDALCEKALKYLPIDK

SEQ ID NO: 13623 - protein, 25 aa, synthetic construct
  REGION 1..25: note = Description of Artificial Sequence: Synthetic peptide
QGSEYDYVIFTQTTETAHSCNVNRF

SEQ ID NO: 13624 - protein, 25 aa, synthetic construct
  REGION 1..25: note = Description of Artificial Sequence: Synthetic peptide
GSEYDYVIFTQTTETAHSCNVNRFN

SEQ ID NO: 13625 - protein, 25 aa, synthetic construct
  REGION 1..25: note = Description of Artificial Sequence: Synthetic peptide
SQGSEYDYVIFTQTTETAHSCNVNR

SEQ ID NO: 13626 - protein, 25 aa, synthetic construct
  REGION 1..25: note = Description of Artificial Sequence: Synthetic peptide
KSNLKPFERDISTEIYQAGSTPCNG

SEQ ID NO: 13627 - protein, 25 aa, synthetic construct
  REGION 1..25: note = Description of Artificial Sequence: Synthetic peptide
TLKATEETFKLSYGIATVREVLSDR

SEQ ID NO: 13628 - protein, 25 aa, synthetic construct
  REGION 1..25: note = Description of Artificial Sequence: Synthetic peptide
ATEETFKLSYGIATVREVLSDRELH

SEQ ID NO: 13629 - protein, 25 aa, synthetic construct
  REGION 1..25: note = Description of Artificial Sequence: Synthetic peptide
KATEETFKLSYGIATVREVLSDREL

SEQ ID NO: 13630 - protein, 25 aa, synthetic construct
  REGION 1..25: note = Description of Artificial Sequence: Synthetic peptide
LKATEETFKLSYGIATVREVLSDRE

SEQ ID NO: 13631 - protein, 25 aa, synthetic construct
  REGION 1..25: note = Description of Artificial Sequence: Synthetic peptide
EETGTLIVNSVLLFLAFVVFLLVTL

SEQ ID NO: 13632 - protein, 25 aa, synthetic construct
  REGION 1..25: note = Description of Artificial Sequence: Synthetic peptide
LNTLVKQLSSNFGAISSVLNDILSR

SEQ ID NO: 13633 - protein, 25 aa, synthetic construct
  REGION 1..25: note = Description of Artificial Sequence: Synthetic peptide
ALNTLVKQLSSNFGAISSVLNDILS

SEQ ID NO: 13634 - protein, 25 aa, synthetic construct
  REGION 1..25: note = Description of Artificial Sequence: Synthetic peptide
FSQILPDPSKPSKRSFIEDLLFNKV

SEQ ID NO: 13635 - protein, 25 aa, synthetic construct
  REGION 1..25: note = Description of Artificial Sequence: Synthetic peptide
NFSQILPDPSKPSKRSFIEDLLFNK

SEQ ID NO: 13636 - protein, 25 aa, synthetic construct
  REGION 1..25: note = Description of Artificial Sequence: Synthetic peptide
SQILPDPSKPSKRSFIEDLLFNKVT

SEQ ID NO: 13637 - protein, 25 aa, synthetic construct
  REGION 1..25: note = Description of Artificial Sequence: Synthetic peptide
QLSSNFGAISSVLNDILSRLDKVEA

SEQ ID NO: 13638 - protein, 25 aa, synthetic construct
  REGION 1..25: note = Description of Artificial Sequence: Synthetic peptide
LVKQLSSNFGAISSVLNDILSRLDK

SEQ ID NO: 13639 - protein, 25 aa, synthetic construct
  REGION 1..25: note = Description of Artificial Sequence: Synthetic peptide
KQLSSNFGAISSVLNDILSRLDKVE

SEQ ID NO: 13640 - protein, 25 aa, synthetic construct
  REGION 1..25: note = Description of Artificial Sequence: Synthetic peptide
VKQLSSNFGAISSVLNDILSRLDKV

SEQ ID NO: 13641 - protein, 25 aa, synthetic construct
  REGION 1..25: note = Description of Artificial Sequence: Synthetic peptide
GPHEFCSQHTMLVKQGDDYVYLPYP

SEQ ID NO: 13642 - protein, 25 aa, synthetic construct
  REGION 1..25: note = Description of Artificial Sequence: Synthetic peptide
KGPHEFCSQHTMLVKQGDDYVYLPY

SEQ ID NO: 13643 - protein, 25 aa, synthetic construct
  REGION 1..25: note = Description of Artificial Sequence: Synthetic peptide
SAQCFKMFYKGVITHDVSSAINRPQ

SEQ ID NO: 13644 - protein, 25 aa, synthetic construct
  REGION 1..25: note = Description of Artificial Sequence: Synthetic peptide
QNAVASKILGLPTQTVDSSQGSEYD

SEQ ID NO: 13645 - protein, 25 aa, synthetic construct
  REGION 1..25: note = Description of Artificial Sequence: Synthetic peptide
NEVAKNLNESLIDLQELGKYEQYIK

SEQ ID NO: 13646 - protein, 25 aa, synthetic construct
  REGION 1..25: note = Description of Artificial Sequence: Synthetic peptide
RLNEVAKNLNESLIDLQELGKYEQY

SEQ ID NO: 13647 - protein, 25 aa, synthetic construct
  REGION 1..25: note = Description of Artificial Sequence: Synthetic peptide
LNEVAKNLNESLIDLQELGKYEQYI

SEQ ID NO: 13648 - protein, 25 aa, synthetic construct
  REGION 1..25: note = Description of Artificial Sequence: Synthetic peptide
AKNLNESLIDLQELGKYEQYIKWPW

SEQ ID NO: 13649 - protein, 25 aa, synthetic construct
  REGION 1..25: note = Description of Artificial Sequence: Synthetic peptide
KNLNESLIDLQELGKYEQYIKWPWY

SEQ ID NO: 13650 - protein, 25 aa, synthetic construct
  REGION 1..25: note = Description of Artificial Sequence: Synthetic peptide
VAKNLNESLIDLQELGKYEQYIKWP

SEQ ID NO: 13651 - protein, 25 aa, synthetic construct
  REGION 1..25: note = Description of Artificial Sequence: Synthetic peptide
EVAKNLNESLIDLQELGKYEQYIKW

SEQ ID NO: 13652 - protein, 25 aa, synthetic construct
  REGION 1..25: note = Description of Artificial Sequence: Synthetic peptide
KMFYKGVITHDVSSAINRPQIGVVR

SEQ ID NO: 13653 - protein, 25 aa, synthetic construct
  REGION 1..25: note = Description of Artificial Sequence: Synthetic peptide
FYKGVITHDVSSAINRPQIGVVREF

SEQ ID NO: 13654 - protein, 25 aa, synthetic construct
  REGION 1..25: note = Description of Artificial Sequence: Synthetic peptide
FKMFYKGVITHDVSSAINRPQIGVV

SEQ ID NO: 13655 - protein, 25 aa, synthetic construct
  REGION 1..25: note = Description of Artificial Sequence: Synthetic peptide
CFKMFYKGVITHDVSSAINRPQIGV

SEQ ID NO: 13656 - protein, 25 aa, synthetic construct
  REGION 1..25: note = Description of Artificial Sequence: Synthetic peptide
QCFKMFYKGVITHDVSSAINRPQIG

SEQ ID NO: 13657 - protein, 25 aa, synthetic construct
  REGION 1..25: note = Description of Artificial Sequence: Synthetic peptide
MFYKGVITHDVSSAINRPQIGVVRE

SEQ ID NO: 13658 - protein, 25 aa, synthetic construct
  REGION 1..25: note = Description of Artificial Sequence: Synthetic peptide
DRLNEVAKNLNESLIDLQELGKYEQ

SEQ ID NO: 13659 - protein, 25 aa, synthetic construct
  REGION 1..25: note = Description of Artificial Sequence: Synthetic peptide
PARMAGNGGDAALALLLLDRLNQLE

SEQ ID NO: 13660 - protein, 25 aa, synthetic construct
  REGION 1..25: note = Description of Artificial Sequence: Synthetic peptide
TPSDFVRATATIPIQASLPFGWLIV

SEQ ID NO: 13661 - protein, 25 aa, synthetic construct
  REGION 1..25: note = Description of Artificial Sequence: Synthetic peptide
CTFEYVSQPFLMDLEGKQGNFKNLR

SEQ ID NO: 13662 - protein, 25 aa, synthetic construct
  REGION 1..25: note = Description of Artificial Sequence: Synthetic peptide
ANQVIVNNLDKSAGFPFNKWGKARL

SEQ ID NO: 13663 - protein, 25 aa, synthetic construct
  REGION 1..25: note = Description of Artificial Sequence: Synthetic peptide
INANQVIVNNLDKSAGFPFNKWGKA

SEQ ID NO: 13664 - protein, 25 aa, synthetic construct
  REGION 1..25: note = Description of Artificial Sequence: Synthetic peptide
GCINANQVIVNNLDKSAGFPFNKWG

SEQ ID NO: 13665 - protein, 25 aa, synthetic construct
  REGION 1..25: note = Description of Artificial Sequence: Synthetic peptide
GGCINANQVIVNNLDKSAGFPFNKW

SEQ ID NO: 13666 - protein, 25 aa, synthetic construct
  REGION 1..25: note = Description of Artificial Sequence: Synthetic peptide
NANQVIVNNLDKSAGFPFNKWGKAR

SEQ ID NO: 13667 - protein, 25 aa, synthetic construct
  REGION 1..25: note = Description of Artificial Sequence: Synthetic peptide
CINANQVIVNNLDKSAGFPFNKWGK

SEQ ID NO: 13668 - protein, 25 aa, synthetic construct
  REGION 1..25: note = Description of Artificial Sequence: Synthetic peptide
PRRNVATLQAENVTGLFKDCSKVIT

SEQ ID NO: 13669 - protein, 25 aa, synthetic construct
  REGION 1..25: note = Description of Artificial Sequence: Synthetic peptide
WDYKRDAPAHISTIGVCSMTDIAKK

SEQ ID NO: 13670 - protein, 25 aa, synthetic construct
  REGION 1..25: note = Description of Artificial Sequence: Synthetic peptide
MEVTPSGTWLTYTGAIKLDDKDPNF

SEQ ID NO: 13671 - protein, 25 aa, synthetic construct
  REGION 1..25: note = Description of Artificial Sequence: Synthetic peptide
DMYSVMLTNDNTSRYWEPEFYEAMY

SEQ ID NO: 13672 - protein, 25 aa, synthetic construct
  REGION 1..25: note = Description of Artificial Sequence: Synthetic peptide
LDMYSVMLTNDNTSRYWEPEFYEAM

SEQ ID NO: 13673 - protein, 25 aa, synthetic construct
  REGION 1..25: note = Description of Artificial Sequence: Synthetic peptide
IGMEVTPSGTWLTYTGAIKLDDKDP

SEQ ID NO: 13674 - protein, 25 aa, synthetic construct
  REGION 1..25: note = Description of Artificial Sequence: Synthetic peptide
DKSAQCFKMFYKGVITHDVSSAINR

SEQ ID NO: 13675 - protein, 25 aa, synthetic construct
  REGION 1..25: note = Description of Artificial Sequence: Synthetic peptide
PETTADIVVFDEISMATNYDLSVVN

SEQ ID NO: 13676 - protein, 25 aa, synthetic construct
  REGION 1..25: note = Description of Artificial Sequence: Synthetic peptide
DVNLHSSRLSFKELLVYAADPAMHA

SEQ ID NO: 13677 - protein, 25 aa, synthetic construct
  REGION 1..25: note = Description of Artificial Sequence: Synthetic peptide
MPILTLTRALTAESHVDTDLTKPYI

SEQ ID NO: 13678 - protein, 25 aa, synthetic construct
  REGION 1..25: note = Description of Artificial Sequence: Synthetic peptide
VSQPFLMDLEGKQGNFKNLREFVFK

SEQ ID NO: 13679 - protein, 25 aa, synthetic construct
  REGION 1..25: note = Description of Artificial Sequence: Synthetic peptide
KRISNCVADYSVLYNSASFSTFKCY

SEQ ID NO: 13680 - protein, 25 aa, synthetic construct
  REGION 1..25: note = Description of Artificial Sequence: Synthetic peptide
RISNCVADYSVLYNSASFSTFKCYG

SEQ ID NO: 13681 - protein, 25 aa, synthetic construct
  REGION 1..25: note = Description of Artificial Sequence: Synthetic peptide
FIEDLLFNKVTLADAGFIKQYGDCL

SEQ ID NO: 13682 - protein, 25 aa, synthetic construct
  REGION 1..25: note = Description of Artificial Sequence: Synthetic peptide
QGEIKDATPSDFVRATATIPIQASL

SEQ ID NO: 13683 - protein, 25 aa, synthetic construct
  REGION 1..25: note = Description of Artificial Sequence: Synthetic peptide
TETAHSCNVNRFNVAITRAKVGILC

SEQ ID NO: 13684 - protein, 25 aa, synthetic construct
  REGION 1..25: note = Description of Artificial Sequence: Synthetic peptide
ECFDKFKVNSTLEQYVFCTVNALPE

SEQ ID NO: 13685 - protein, 25 aa, synthetic construct
  REGION 1..25: note = Description of Artificial Sequence: Synthetic peptide
QSLQTYVTQQLIRAAEIRASANLAA

SEQ ID NO: 13686 - protein, 25 aa, synthetic construct
  REGION 1..25: note = Description of Artificial Sequence: Synthetic peptide
LNRALTGIAVEQDKNTQEVFAQVKQ

SEQ ID NO: 13687 - protein, 25 aa, synthetic construct
  REGION 1..25: note = Description of Artificial Sequence: Synthetic peptide
QLNRALTGIAVEQDKNTQEVFAQVK

SEQ ID NO: 13688 - protein, 25 aa, synthetic construct
  REGION 1..25: note = Description of Artificial Sequence: Synthetic peptide
PVTLACFVLAAVYRINWITGGIAIA

SEQ ID NO: 13689 - protein, 25 aa, synthetic construct
  REGION 1..25: note = Description of Artificial Sequence: Synthetic peptide
FLWLLWPVTLACFVLAAVYRINWIT

SEQ ID NO: 13690 - protein, 25 aa, synthetic construct
  REGION 1..25: note = Description of Artificial Sequence: Synthetic peptide
EDLLFNKVTLADAGFIKQYGDCLGD

SEQ ID NO: 13691 - protein, 25 aa, synthetic construct
  REGION 1..25: note = Description of Artificial Sequence: Synthetic peptide
PRQKRTATKAYNVTQAFGRRGPEQT

SEQ ID NO: 13692 - protein, 25 aa, synthetic construct
  REGION 1..25: note = Description of Artificial Sequence: Synthetic peptide
KPRQKRTATKAYNVTQAFGRRGPEQ

SEQ ID NO: 13693 - protein, 25 aa, synthetic construct
  REGION 1..25: note = Description of Artificial Sequence: Synthetic peptide
AFDIYNDKVAGFAKFLKTNCCRFQE

SEQ ID NO: 13694 - protein, 25 aa, synthetic construct
  REGION 1..25: note = Description of Artificial Sequence: Synthetic peptide
PLSETKCTLKSFTVEKGIYQTSNFR

SEQ ID NO: 13695 - protein, 25 aa, synthetic construct
  REGION 1..25: note = Description of Artificial Sequence: Synthetic peptide
DPLSETKCTLKSFTVEKGIYQTSNF

SEQ ID NO: 13696 - protein, 25 aa, synthetic construct
  REGION 1..25: note = Description of Artificial Sequence: Synthetic peptide
LSETKCTLKSFTVEKGIYQTSNFRV

SEQ ID NO: 13697 - protein, 25 aa, synthetic construct
  REGION 1..25: note = Description of Artificial Sequence: Synthetic peptide
LDPLSETKCTLKSFTVEKGIYQTSN

SEQ ID NO: 13698 - protein, 25 aa, synthetic construct
  REGION 1..25: note = Description of Artificial Sequence: Synthetic peptide
FPNITNLCPFGEVFNATRFASVYAW

SEQ ID NO: 13699 - protein, 25 aa, synthetic construct
  REGION 1..25: note = Description of Artificial Sequence: Synthetic peptide
KNLREFVFKNIDGYFKIYSKHTPIN

SEQ ID NO: 13700 - protein, 25 aa, synthetic construct
  REGION 1..25: note = Description of Artificial Sequence: Synthetic peptide
NLREFVFKNIDGYFKIYSKHTPINL

SEQ ID NO: 13701 - protein, 25 aa, synthetic construct
  REGION 1..25: note = Description of Artificial Sequence: Synthetic peptide
FQFCNDPFLGVYYHKNNKSWMESEF

SEQ ID NO: 13702 - protein, 25 aa, synthetic construct
  REGION 1..25: note = Description of Artificial Sequence: Synthetic peptide
EFQFCNDPFLGVYYHKNNKSWMESE

SEQ ID NO: 13703 - protein, 25 aa, synthetic construct
  REGION 1..25: note = Description of Artificial Sequence: Synthetic peptide
PQADVEWKFYDAQPCSDKAYKIEEL

SEQ ID NO: 13704 - protein, 25 aa, synthetic construct
  REGION 1..25: note = Description of Artificial Sequence: Synthetic peptide
CTVNALPETTADIVVFDEISMATNY

SEQ ID NO: 13705 - protein, 25 aa, synthetic construct
  REGION 1..25: note = Description of Artificial Sequence: Synthetic peptide
TVNALPETTADIVVFDEISMATNYD

SEQ ID NO: 13706 - protein, 25 aa, synthetic construct
  REGION 1..25: note = Description of Artificial Sequence: Synthetic peptide
FCTVNALPETTADIVVFDEISMATN

SEQ ID NO: 13707 - protein, 25 aa, synthetic construct
  REGION 1..25: note = Description of Artificial Sequence: Synthetic peptide
GPEAGLPYGANKDGIIWVATEGALN

SEQ ID NO: 13708 - protein, 25 aa, synthetic construct
  REGION 1..25: note = Description of Artificial Sequence: Synthetic peptide
EAGLPYGANKDGIIWVATEGALNTP

SEQ ID NO: 13709 - protein, 25 aa, synthetic construct
  REGION 1..25: note = Description of Artificial Sequence: Synthetic peptide
PEAGLPYGANKDGIIWVATEGALNT

SEQ ID NO: 13710 - protein, 25 aa, synthetic construct
  REGION 1..25: note = Description of Artificial Sequence: Synthetic peptide
FLGTCRRCPAEIVDTVSALVYDNKL

SEQ ID NO: 13711 - protein, 25 aa, synthetic construct
  REGION 1..25: note = Description of Artificial Sequence: Synthetic peptide
MFLGTCRRCPAEIVDTVSALVYDNK

SEQ ID NO: 13712 - protein, 25 aa, synthetic construct
  REGION 1..25: note = Description of Artificial Sequence: Synthetic peptide
KIADKYVRNLQHRLYECLYRNRDVD

SEQ ID NO: 13713 - protein, 25 aa, synthetic construct
  REGION 1..25: note = Description of Artificial Sequence: Synthetic peptide
IADKYVRNLQHRLYECLYRNRDVDT

SEQ ID NO: 13714 - protein, 25 aa, synthetic construct
  REGION 1..25: note = Description of Artificial Sequence: Synthetic peptide
ETQALPQRQKKQQTVTLLPAADLDD

SEQ ID NO: 13715 - protein, 25 aa, synthetic construct
  REGION 1..25: note = Description of Artificial Sequence: Synthetic peptide
TQALPQRQKKQQTVTLLPAADLDDF

SEQ ID NO: 13716 - protein, 25 aa, synthetic construct
  REGION 1..25: note = Description of Artificial Sequence: Synthetic peptide
TKRFDNPVLPFNDGVYFASTEKSNI

SEQ ID NO: 13717 - protein, 25 aa, synthetic construct
  REGION 1..25: note = Description of Artificial Sequence: Synthetic peptide
KRFDNPVLPFNDGVYFASTEKSNII

SEQ ID NO: 13718 - protein, 25 aa, synthetic construct
  REGION 1..25: note = Description of Artificial Sequence: Synthetic peptide
NKDGIIWVATEGALNTPKDHIGTRN

SEQ ID NO: 13719 - protein, 25 aa, synthetic construct
  REGION 1..25: note = Description of Artificial Sequence: Synthetic peptide
KDGIIWVATEGALNTPKDHIGTRNP

SEQ ID NO: 13720 - protein, 25 aa, synthetic construct
  REGION 1..25: note = Description of Artificial Sequence: Synthetic peptide
FTTAPAICHDGKAHFPREGVFVSNG

SEQ ID NO: 13721 - protein, 25 aa, synthetic construct
  REGION 1..25: note = Description of Artificial Sequence: Synthetic peptide
TAPAICHDGKAHFPREGVFVSNGTH

SEQ ID NO: 13722 - protein, 25 aa, synthetic construct
  REGION 1..25: note = Description of Artificial Sequence: Synthetic peptide
NFTTAPAICHDGKAHFPREGVFVSN

SEQ ID NO: 13723 - protein, 25 aa, synthetic construct
  REGION 1..25: note = Description of Artificial Sequence: Synthetic peptide
KNFTTAPAICHDGKAHFPREGVFVS

SEQ ID NO: 13724 - protein, 25 aa, synthetic construct
  REGION 1..25: note = Description of Artificial Sequence: Synthetic peptide
TTAPAICHDGKAHFPREGVFVSNGT

SEQ ID NO: 13725 - protein, 25 aa, synthetic construct
  REGION 1..25: note = Description of Artificial Sequence: Synthetic peptide
EKNFTTAPAICHDGKAHFPREGVFV

SEQ ID NO: 13726 - protein, 25 aa, synthetic construct
  REGION 1..25: note = Description of Artificial Sequence: Synthetic peptide
SPRWYFYYLGTGPEAGLPYGANKDG

SEQ ID NO: 13727 - protein, 25 aa, synthetic construct
  REGION 1..25: note = Description of Artificial Sequence: Synthetic peptide
KRDAPAHISTIGVCSMTDIAKKPTE

SEQ ID NO: 13728 - protein, 25 aa, synthetic construct
  REGION 1..25: note = Description of Artificial Sequence: Synthetic peptide
RDAPAHISTIGVCSMTDIAKKPTET

SEQ ID NO: 13729 - protein, 25 aa, synthetic construct
  REGION 1..25: note = Description of Artificial Sequence: Synthetic peptide
DAPAHISTIGVCSMTDIAKKPTETI

SEQ ID NO: 13730 - protein, 25 aa, synthetic construct
  REGION 1..25: note = Description of Artificial Sequence: Synthetic peptide
APAHISTIGVCSMTDIAKKPTETIC

SEQ ID NO: 13731 - protein, 25 aa, synthetic construct
  REGION 1..25: note = Description of Artificial Sequence: Synthetic peptide
GTKRFDNPVLPFNDGVYFASTEKSN

SEQ ID NO: 13732 - protein, 25 aa, synthetic construct
  REGION 1..25: note = Description of Artificial Sequence: Synthetic peptide
RTTCFSVAALTNNVAFQTVKPGNFN

SEQ ID NO: 13733 - protein, 25 aa, synthetic construct
  REGION 1..25: note = Description of Artificial Sequence: Synthetic peptide
LTVLPPLLTDEMIAQYTSALLAGTI

SEQ ID NO: 13734 - protein, 25 aa, synthetic construct
  REGION 1..25: note = Description of Artificial Sequence: Synthetic peptide
LEAPFLYLYALVYFLQSINFVRIIM

SEQ ID NO: 13735 - protein, 25 aa, synthetic construct
  REGION 1..25: note = Description of Artificial Sequence: Synthetic peptide
GLEAPFLYLYALVYFLQSINFVRII

SEQ ID NO: 13736 - protein, 25 aa, synthetic construct
  REGION 1..25: note = Description of Artificial Sequence: Synthetic peptide
EAPFLYLYALVYFLQSINFVRIIMR

SEQ ID NO: 13737 - protein, 25 aa, synthetic construct
  REGION 1..25: note = Description of Artificial Sequence: Synthetic peptide
TVYDPLQPELDSFKEELDKYFKNHT

SEQ ID NO: 13738 - protein, 25 aa, synthetic construct
  REGION 1..25: note = Description of Artificial Sequence: Synthetic peptide
VVRIKIVQMLSDTLKNLSDRVVFVL

SEQ ID NO: 13739 - protein, 25 aa, synthetic construct
  REGION 1..25: note = Description of Artificial Sequence: Synthetic peptide
LPWNVVRIKIVQMLSDTLKNLSDRV

SEQ ID NO: 13740 - protein, 25 aa, synthetic construct
  REGION 1..25: note = Description of Artificial Sequence: Synthetic peptide
NVVRIKIVQMLSDTLKNLSDRVVFV

SEQ ID NO: 13741 - protein, 25 aa, synthetic construct
  REGION 1..25: note = Description of Artificial Sequence: Synthetic peptide
WNVVRIKIVQMLSDTLKNLSDRVVF

SEQ ID NO: 13742 - protein, 25 aa, synthetic construct
  REGION 1..25: note = Description of Artificial Sequence: Synthetic peptide
PWNVVRIKIVQMLSDTLKNLSDRVV

SEQ ID NO: 13743 - protein, 25 aa, synthetic construct
  REGION 1..25: note = Description of Artificial Sequence: Synthetic peptide
TVREVLSDRELHLSWEVGKPRPPLN

SEQ ID NO: 13744 - protein, 25 aa, synthetic construct
  REGION 1..25: note = Description of Artificial Sequence: Synthetic peptide
ATVREVLSDRELHLSWEVGKPRPPL

SEQ ID NO: 13745 - protein, 25 aa, synthetic construct
  REGION 1..25: note = Description of Artificial Sequence: Synthetic peptide
VREVLSDRELHLSWEVGKPRPPLNR

SEQ ID NO: 13746 - protein, 25 aa, synthetic construct
  REGION 1..25: note = Description of Artificial Sequence: Synthetic peptide
VYDPLQPELDSFKEELDKYFKNHTS

SEQ ID NO: 13747 - protein, 25 aa, synthetic construct
  REGION 1..25: note = Description of Artificial Sequence: Synthetic peptide
PLQPELDSFKEELDKYFKNHTSPDV

SEQ ID NO: 13748 - protein, 25 aa, synthetic construct
  REGION 1..25: note = Description of Artificial Sequence: Synthetic peptide
DPLQPELDSFKEELDKYFKNHTSPD

SEQ ID NO: 13749 - protein, 25 aa, synthetic construct
  REGION 1..25: note = Description of Artificial Sequence: Synthetic peptide
YDPLQPELDSFKEELDKYFKNHTSP

SEQ ID NO: 13750 - protein, 25 aa, synthetic construct
  REGION 1..25: note = Description of Artificial Sequence: Synthetic peptide
PSKRSFIEDLLFNKVTLADAGFIKQ

SEQ ID NO: 13751 - protein, 25 aa, synthetic construct
  REGION 1..25: note = Description of Artificial Sequence: Synthetic peptide
FLVFLGIITTVAAFHQECSLQSCTQ

SEQ ID NO: 13752 - protein, 25 aa, synthetic construct
  REGION 1..25: note = Description of Artificial Sequence: Synthetic peptide
LVFLGIITTVAAFHQECSLQSCTQH

SEQ ID NO: 13753 - protein, 25 aa, synthetic construct
  REGION 1..25: note = Description of Artificial Sequence: Synthetic peptide
PKEITVATSRTLSYYKLGASQRVAG

SEQ ID NO: 13754 - protein, 25 aa, synthetic construct
  REGION 1..25: note = Description of Artificial Sequence: Synthetic peptide
ESEFRVYSSANNCTFEYVSQPFLMD

SEQ ID NO: 13755 - protein, 25 aa, synthetic construct
  REGION 1..25: note = Description of Artificial Sequence: Synthetic peptide
QPTESIVRFPNITNLCPFGEVFNAT

SEQ ID NO: 13756 - protein, 25 aa, synthetic construct
  REGION 1..25: note = Description of Artificial Sequence: Synthetic peptide
DELTGHMLDMYSVMLTNDNTSRYWE

SEQ ID NO: 13757 - protein, 25 aa, synthetic construct
  REGION 1..25: note = Description of Artificial Sequence: Synthetic peptide
RNLQHRLYECLYRNRDVDTDFVNEF

SEQ ID NO: 13758 - protein, 25 aa, synthetic construct
  REGION 1..25: note = Description of Artificial Sequence: Synthetic peptide
LPFFYYSDSPCESHGKQVVSDIDYV

SEQ ID NO: 13759 - protein, 25 aa, synthetic construct
  REGION 1..25: note = Description of Artificial Sequence: Synthetic peptide
QLPFFYYSDSPCESHGKQVVSDIDY

SEQ ID NO: 13760 - protein, 25 aa, synthetic construct
  REGION 1..25: note = Description of Artificial Sequence: Synthetic peptide
KQLPFFYYSDSPCESHGKQVVSDID

SEQ ID NO: 13761 - protein, 25 aa, synthetic construct
  REGION 1..25: note = Description of Artificial Sequence: Synthetic peptide
SELVIGAVILRGHLRIAGHHLGRCD

SEQ ID NO: 13762 - protein, 25 aa, synthetic construct
  REGION 1..25: note = Description of Artificial Sequence: Synthetic peptide
ESELVIGAVILRGHLRIAGHHLGRC

SEQ ID NO: 13763 - protein, 25 aa, synthetic construct
  REGION 1..25: note = Description of Artificial Sequence: Synthetic peptide
NQDVNLHSSRLSFKELLVYAADPAM

SEQ ID NO: 13764 - protein, 25 aa, synthetic construct
  REGION 1..25: note = Description of Artificial Sequence: Synthetic peptide
VDRYPANSIVCRFDTRVLSNLNLPG

SEQ ID NO: 13765 - protein, 25 aa, synthetic construct
  REGION 1..25: note = Description of Artificial Sequence: Synthetic peptide
PAWRKAVFISPYNSQNAVASKILGL

SEQ ID NO: 13766 - protein, 25 aa, synthetic construct
  REGION 1..25: note = Description of Artificial Sequence: Synthetic peptide
AWRKAVFISPYNSQNAVASKILGLP

SEQ ID NO: 13767 - protein, 25 aa, synthetic construct
  REGION 1..25: note = Description of Artificial Sequence: Synthetic peptide
TRNPAWRKAVFISPYNSQNAVASKI

SEQ ID NO: 13768 - protein, 25 aa, synthetic construct
  REGION 1..25: note = Description of Artificial Sequence: Synthetic peptide
RNPAWRKAVFISPYNSQNAVASKIL

SEQ ID NO: 13769 - protein, 25 aa, synthetic construct
  REGION 1..25: note = Description of Artificial Sequence: Synthetic peptide
NPAWRKAVFISPYNSQNAVASKILG

SEQ ID NO: 13770 - protein, 25 aa, synthetic construct
  REGION 1..25: note = Description of Artificial Sequence: Synthetic peptide
WRKAVFISPYNSQNAVASKILGLPT

SEQ ID NO: 13771 - protein, 25 aa, synthetic construct
  REGION 1..25: note = Description of Artificial Sequence: Synthetic peptide
TFKVSIWNLDYIINLIIKNLSKSLT

SEQ ID NO: 13772 - protein, 25 aa, synthetic construct
  REGION 1..25: note = Description of Artificial Sequence: Synthetic peptide
DSATLPKGIMMNVAKYTQLCQYLNT

SEQ ID NO: 13773 - protein, 25 aa, synthetic construct
  REGION 1..25: note = Description of Artificial Sequence: Synthetic peptide
SATLPKGIMMNVAKYTQLCQYLNTL

SEQ ID NO: 13774 - protein, 25 aa, synthetic construct
  REGION 1..25: note = Description of Artificial Sequence: Synthetic peptide
DGNKIADKYVRNLQHRLYECLYRNR

SEQ ID NO: 13775 - protein, 25 aa, synthetic construct
  REGION 1..25: note = Description of Artificial Sequence: Synthetic peptide
EISMATNYDLSVVNARLRAKHYVYI

SEQ ID NO: 13776 - protein, 25 aa, synthetic construct
  REGION 1..25: note = Description of Artificial Sequence: Synthetic peptide
ISMATNYDLSVVNARLRAKHYVYIG

SEQ ID NO: 13777 - protein, 25 aa, synthetic construct
  REGION 1..25: note = Description of Artificial Sequence: Synthetic peptide
ASVYAWNRKRISNCVADYSVLYNSA

SEQ ID NO: 13778 - protein, 25 aa, synthetic construct
  REGION 1..25: note = Description of Artificial Sequence: Synthetic peptide
AQALNTLVKQLSSNFGAISSVLNDI

SEQ ID NO: 13779 - protein, 25 aa, synthetic construct
  REGION 1..25: note = Description of Artificial Sequence: Synthetic peptide
YNDKVAGFAKFLKTNCCRFQEKDED

SEQ ID NO: 13780 - protein, 25 aa, synthetic construct
  REGION 1..25: note = Description of Artificial Sequence: Synthetic peptide
NYDLSVVNARLRAKHYVYIGDPAQL

SEQ ID NO: 13781 - protein, 25 aa, synthetic construct
  REGION 1..25: note = Description of Artificial Sequence: Synthetic peptide
TNYDLSVVNARLRAKHYVYIGDPAQ

SEQ ID NO: 13782 - protein, 25 aa, synthetic construct
  REGION 1..25: note = Description of Artificial Sequence: Synthetic peptide
YDLSVVNARLRAKHYVYIGDPAQLP

SEQ ID NO: 13783 - protein, 25 aa, synthetic construct
  REGION 1..25: note = Description of Artificial Sequence: Synthetic peptide
GKIADYNYKLPDDFTGCVIAWNSNN

SEQ ID NO: 13784 - protein, 25 aa, synthetic construct
  REGION 1..25: note = Description of Artificial Sequence: Synthetic peptide
KIADYNYKLPDDFTGCVIAWNSNNL

SEQ ID NO: 13785 - protein, 25 aa, synthetic construct
  REGION 1..25: note = Description of Artificial Sequence: Synthetic peptide
VVYRAFDIYNDKVAGFAKFLKTNCC

SEQ ID NO: 13786 - protein, 25 aa, synthetic construct
  REGION 1..25: note = Description of Artificial Sequence: Synthetic peptide
TDVVYRAFDIYNDKVAGFAKFLKTN

SEQ ID NO: 13787 - protein, 25 aa, synthetic construct
  REGION 1..25: note = Description of Artificial Sequence: Synthetic peptide
VYRAFDIYNDKVAGFAKFLKTNCCR

SEQ ID NO: 13788 - protein, 25 aa, synthetic construct
  REGION 1..25: note = Description of Artificial Sequence: Synthetic peptide
DVVYRAFDIYNDKVAGFAKFLKTNC

SEQ ID NO: 13789 - protein, 25 aa, synthetic construct
  REGION 1..25: note = Description of Artificial Sequence: Synthetic peptide
MKFLVFLGIITTVAAFHQECSLQSC

SEQ ID NO: 13790 - protein, 25 aa, synthetic construct
  REGION 1..25: note = Description of Artificial Sequence: Synthetic peptide
SVVNARLRAKHYVYIGDPAQLPAPR

SEQ ID NO: 13791 - protein, 25 aa, synthetic construct
  REGION 1..25: note = Description of Artificial Sequence: Synthetic peptide
DLSVVNARLRAKHYVYIGDPAQLPA

SEQ ID NO: 13792 - protein, 25 aa, synthetic construct
  REGION 1..25: note = Description of Artificial Sequence: Synthetic peptide
RIVYTACSHAAVDALCEKALKYLPI

SEQ ID NO: 13793 - protein, 25 aa, synthetic construct
  REGION 1..25: note = Description of Artificial Sequence: Synthetic peptide
IVYTACSHAAVDALCEKALKYLPID

SEQ ID NO: 13794 - protein, 25 aa, synthetic construct
  REGION 1..25: note = Description of Artificial Sequence: Synthetic peptide
LVASIKNFKSVLYYQNNVFMSEAKC

SEQ ID NO: 13795 - protein, 25 aa, synthetic construct
  REGION 1..25: note = Description of Artificial Sequence: Synthetic peptide
GLVASIKNFKSVLYYQNNVFMSEAK

SEQ ID NO: 13796 - protein, 25 aa, synthetic construct
  REGION 1..25: note = Description of Artificial Sequence: Synthetic peptide
DIYNDKVAGFAKFLKTNCCRFQEKD

SEQ ID NO: 13797 - protein, 25 aa, synthetic construct
  REGION 1..25: note = Description of Artificial Sequence: Synthetic peptide
MRTFKVSIWNLDYIINLIIKNLSKS

SEQ ID NO: 13798 - protein, 25 aa, synthetic construct
  REGION 1..25: note = Description of Artificial Sequence: Synthetic peptide
RTFKVSIWNLDYIINLIIKNLSKSL

SEQ ID NO: 13799 - protein, 25 aa, synthetic construct
  REGION 1..25: note = Description of Artificial Sequence: Synthetic peptide
QKKQQTVTLLPAADLDDFSKQLQQS

SEQ ID NO: 13800 - protein, 25 aa, synthetic construct
  REGION 1..25: note = Description of Artificial Sequence: Synthetic peptide
SRIIPARARVECFDKFKVNSTLEQY

SEQ ID NO: 13801 - protein, 25 aa, synthetic construct
  REGION 1..25: note = Description of Artificial Sequence: Synthetic peptide
IIPARARVECFDKFKVNSTLEQYVF

SEQ ID NO: 13802 - protein, 25 aa, synthetic construct
  REGION 1..25: note = Description of Artificial Sequence: Synthetic peptide
RIIPARARVECFDKFKVNSTLEQYV

SEQ ID NO: 13803 - protein, 25 aa, synthetic construct
  REGION 1..25: note = Description of Artificial Sequence: Synthetic peptide
VIPTITQMNLKYAISAKNRARTVAG

SEQ ID NO: 13804 - protein, 25 aa, synthetic construct
  REGION 1..25: note = Description of Artificial Sequence: Synthetic peptide
NVIPTITQMNLKYAISAKNRARTVA

SEQ ID NO: 13805 - protein, 25 aa, synthetic construct
  REGION 1..25: note = Description of Artificial Sequence: Synthetic peptide
CFNSTYASQGLVASIKNFKSVLYYQ

SEQ ID NO: 13806 - protein, 25 aa, synthetic construct
  REGION 1..25: note = Description of Artificial Sequence: Synthetic peptide
FNSTYASQGLVASIKNFKSVLYYQN

SEQ ID NO: 13807 - protein, 25 aa, synthetic construct
  REGION 1..25: note = Description of Artificial Sequence: Synthetic peptide
VAALTNNVAFQTVKPGNFNKDFYDF

SEQ ID NO: 13808 - protein, 25 aa, synthetic construct
  REGION 1..25: note = Description of Artificial Sequence: Synthetic peptide
AALTNNVAFQTVKPGNFNKDFYDFA

SEQ ID NO: 13809 - protein, 25 aa, synthetic construct
  REGION 1..25: note = Description of Artificial Sequence: Synthetic peptide
INLVRDLPQGFSALEPLVDLPIGIN

SEQ ID NO: 13810 - protein, 25 aa, synthetic construct
  REGION 1..25: note = Description of Artificial Sequence: Synthetic peptide
DAQPCSDKAYKIEELFYSYATHSDK

SEQ ID NO: 13811 - protein, 25 aa, synthetic construct
  REGION 1..25: note = Description of Artificial Sequence: Synthetic peptide
YAWNRKRISNCVADYSVLYNSASFS

SEQ ID NO: 13812 - protein, 25 aa, synthetic construct
  REGION 1..25: note = Description of Artificial Sequence: Synthetic peptide
AWNRKRISNCVADYSVLYNSASFST

SEQ ID NO: 13813 - protein, 25 aa, synthetic construct
  REGION 1..25: note = Description of Artificial Sequence: Synthetic peptide
WNRKRISNCVADYSVLYNSASFSTF

SEQ ID NO: 13814 - protein, 25 aa, synthetic construct
  REGION 1..25: note = Description of Artificial Sequence: Synthetic peptide
ANVNALLSTDGNKIADKYVRNLQHR

SEQ ID NO: 13815 - protein, 25 aa, synthetic construct
  REGION 1..25: note = Description of Artificial Sequence: Synthetic peptide
NVNALLSTDGNKIADKYVRNLQHRL

SEQ ID NO: 13816 - protein, 25 aa, synthetic construct
  REGION 1..25: note = Description of Artificial Sequence: Synthetic peptide
TANVNALLSTDGNKIADKYVRNLQH

SEQ ID NO: 13817 - protein, 25 aa, synthetic construct
  REGION 1..25: note = Description of Artificial Sequence: Synthetic peptide
VNALLSTDGNKIADKYVRNLQHRLY

SEQ ID NO: 13818 - protein, 25 aa, synthetic construct
  REGION 1..25: note = Description of Artificial Sequence: Synthetic peptide
KSAFVNLKQLPFFYYSDSPCESHGK

SEQ ID NO: 13819 - protein, 25 aa, synthetic construct
  REGION 1..25: note = Description of Artificial Sequence: Synthetic peptide
KQRRPQGLPNNTASWFTALTQHGKE

SEQ ID NO: 13820 - protein, 25 aa, synthetic construct
  REGION 1..25: note = Description of Artificial Sequence: Synthetic peptide
KRNVIPTITQMNLKYAISAKNRART

SEQ ID NO: 13821 - protein, 25 aa, synthetic construct
  REGION 1..25: note = Description of Artificial Sequence: Synthetic peptide
DLPQGFSALEPLVDLPIGINITRFQ

SEQ ID NO: 13822 - protein, 25 aa, synthetic construct
  REGION 1..25: note = Description of Artificial Sequence: Synthetic peptide
LPQGFSALEPLVDLPIGINITRFQT

SEQ ID NO: 13823 - protein, 25 aa, synthetic construct
  REGION 1..25: note = Description of Artificial Sequence: Synthetic peptide
CGDSTECSNLLLQYGSFCTQLNRAL

SEQ ID NO: 13824 - protein, 25 aa, synthetic construct
  REGION 1..25: note = Description of Artificial Sequence: Synthetic peptide
ICGDSTECSNLLLQYGSFCTQLNRA

SEQ ID NO: 13825 - protein, 25 aa, synthetic construct
  REGION 1..25: note = Description of Artificial Sequence: Synthetic peptide
VTANVNALLSTDGNKIADKYVRNLQ

SEQ ID NO: 13826 - protein, 25 aa, synthetic construct
  REGION 1..25: note = Description of Artificial Sequence: Synthetic peptide
LPPLLTDEMIAQYTSALLAGTITSG

SEQ ID NO: 13827 - protein, 25 aa, synthetic construct
  REGION 1..25: note = Description of Artificial Sequence: Synthetic peptide
LLTDEMIAQYTSALLAGTITSGWTF

SEQ ID NO: 13828 - protein, 25 aa, synthetic construct
  REGION 1..25: note = Description of Artificial Sequence: Synthetic peptide
PLLTDEMIAQYTSALLAGTITSGWT

SEQ ID NO: 13829 - protein, 25 aa, synthetic construct
  REGION 1..25: note = Description of Artificial Sequence: Synthetic peptide
PPLLTDEMIAQYTSALLAGTITSGW

SEQ ID NO: 13830 - protein, 25 aa, synthetic construct
  REGION 1..25: note = Description of Artificial Sequence: Synthetic peptide
MWLSYFIASFRLFARTRSMWSFNPE

SEQ ID NO: 13831 - protein, 25 aa, synthetic construct
  REGION 1..25: note = Description of Artificial Sequence: Synthetic peptide
YYHKNNKSWMESEFRVYSSANNCTF

SEQ ID NO: 13832 - protein, 25 aa, synthetic construct
  REGION 1..25: note = Description of Artificial Sequence: Synthetic peptide
IMMNVAKYTQLCQYLNTLTLAVPYN

SEQ ID NO: 13833 - protein, 25 aa, synthetic construct
  REGION 1..25: note = Description of Artificial Sequence: Synthetic peptide
GIMMNVAKYTQLCQYLNTLTLAVPY

SEQ ID NO: 13834 - protein, 25 aa, synthetic construct
  REGION 1..25: note = Description of Artificial Sequence: Synthetic peptide
MMNVAKYTQLCQYLNTLTLAVPYNM

SEQ ID NO: 13835 - protein, 25 aa, synthetic construct
  REGION 1..25: note = Description of Artificial Sequence: Synthetic peptide
PHGVVFLHVTYVPAQEKNFTTAPAI

SEQ ID NO: 13836 - protein, 25 aa, synthetic construct
  REGION 1..25: note = Description of Artificial Sequence: Synthetic peptide
VTIAEILLIIMRTFKVSIWNLDYII

SEQ ID NO: 13837 - protein, 25 aa, synthetic construct
  REGION 1..25: note = Description of Artificial Sequence: Synthetic peptide
TIAEILLIIMRTFKVSIWNLDYIIN

SEQ ID NO: 13838 - protein, 25 aa, synthetic construct
  REGION 1..25: note = Description of Artificial Sequence: Synthetic peptide
FQVTIAEILLIIMRTFKVSIWNLDY

SEQ ID NO: 13839 - protein, 25 aa, synthetic construct
  REGION 1..25: note = Description of Artificial Sequence: Synthetic peptide
IAEILLIIMRTFKVSIWNLDYIINL

SEQ ID NO: 13840 - protein, 25 aa, synthetic construct
  REGION 1..25: note = Description of Artificial Sequence: Synthetic peptide
QVTIAEILLIIMRTFKVSIWNLDYI

SEQ ID NO: 13841 - protein, 25 aa, synthetic construct
  REGION 1..25: note = Description of Artificial Sequence: Synthetic peptide
WQLALSKGVHFVCNLLLLFVTVYSH

SEQ ID NO: 13842 - protein, 25 aa, synthetic construct
  REGION 1..25: note = Description of Artificial Sequence: Synthetic peptide
KRWQLALSKGVHFVCNLLLLFVTVY

SEQ ID NO: 13843 - protein, 25 aa, synthetic construct
  REGION 1..25: note = Description of Artificial Sequence: Synthetic peptide
RWQLALSKGVHFVCNLLLLFVTVYS

SEQ ID NO: 13844 - protein, 25 aa, synthetic construct
  REGION 1..25: note = Description of Artificial Sequence: Synthetic peptide
QLALSKGVHFVCNLLLLFVTVYSHL

SEQ ID NO: 13845 - protein, 25 aa, synthetic construct
  REGION 1..25: note = Description of Artificial Sequence: Synthetic peptide
ASFRLFARTRSMWSFNPETNILLNV

SEQ ID NO: 13846 - protein, 25 aa, synthetic construct
  REGION 1..25: note = Description of Artificial Sequence: Synthetic peptide
NSVCRLMKTIGPDMFLGTCRRCPAE

SEQ ID NO: 13847 - protein, 25 aa, synthetic construct
  REGION 1..25: note = Description of Artificial Sequence: Synthetic peptide
NGTITVEELKKLLEQWNLVIGFLFL

SEQ ID NO: 13848 - protein, 25 aa, synthetic construct
  REGION 1..25: note = Description of Artificial Sequence: Synthetic peptide
LKLRGTAVMSLKEGQINDMILSLLS

SEQ ID NO: 13849 - protein, 25 aa, synthetic construct
  REGION 1..25: note = Description of Artificial Sequence: Synthetic peptide
KLRGTAVMSLKEGQINDMILSLLSK

SEQ ID NO: 13850 - protein, 25 aa, synthetic construct
  REGION 1..25: note = Description of Artificial Sequence: Synthetic peptide
LRGTAVMSLKEGQINDMILSLLSKG

SEQ ID NO: 13851 - protein, 25 aa, synthetic construct
  REGION 1..25: note = Description of Artificial Sequence: Synthetic peptide
RGTAVMSLKEGQINDMILSLLSKGR

SEQ ID NO: 13852 - protein, 25 aa, synthetic construct
  REGION 1..25: note = Description of Artificial Sequence: Synthetic peptide
EEAIRHVRAWIGFDVEGCHATREAV

SEQ ID NO: 13853 - protein, 25 aa, synthetic construct
  REGION 1..25: note = Description of Artificial Sequence: Synthetic peptide
TKCTLKSFTVEKGIYQTSNFRVQPT

SEQ ID NO: 13854 - protein, 25 aa, synthetic construct
  REGION 1..25: note = Description of Artificial Sequence: Synthetic peptide
ETKCTLKSFTVEKGIYQTSNFRVQP

SEQ ID NO: 13855 - protein, 25 aa, synthetic construct
  REGION 1..25: note = Description of Artificial Sequence: Synthetic peptide
VNIQKEIDRLNEVAKNLNESLIDLQ

SEQ ID NO: 13856 - protein, 25 aa, synthetic construct
  REGION 1..25: note = Description of Artificial Sequence: Synthetic peptide
VVNIQKEIDRLNEVAKNLNESLIDL

SEQ ID NO: 13857 - protein, 25 aa, synthetic construct
  REGION 1..25: note = Description of Artificial Sequence: Synthetic peptide
KNIDGYFKIYSKHTPINLVRDLPQG

SEQ ID NO: 13858 - protein, 25 aa, synthetic construct
  REGION 1..25: note = Description of Artificial Sequence: Synthetic peptide
TECSNLLLQYGSFCTQLNRALTGIA

SEQ ID NO: 13859 - protein, 25 aa, synthetic construct
  REGION 1..25: note = Description of Artificial Sequence: Synthetic peptide
LMDLEGKQGNFKNLREFVFKNIDGY

SEQ ID NO: 13860 - protein, 25 aa, synthetic construct
  REGION 1..25: note = Description of Artificial Sequence: Synthetic peptide
LEGKQGNFKNLREFVFKNIDGYFKI

SEQ ID NO: 13861 - protein, 25 aa, synthetic construct
  REGION 1..25: note = Description of Artificial Sequence: Synthetic peptide
DLEGKQGNFKNLREFVFKNIDGYFK

SEQ ID NO: 13862 - protein, 25 aa, synthetic construct
  REGION 1..25: note = Description of Artificial Sequence: Synthetic peptide
EGKQGNFKNLREFVFKNIDGYFKIY

SEQ ID NO: 13863 - protein, 25 aa, synthetic construct
  REGION 1..25: note = Description of Artificial Sequence: Synthetic peptide
FLMDLEGKQGNFKNLREFVFKNIDG

SEQ ID NO: 13864 - protein, 25 aa, synthetic construct
  REGION 1..25: note = Description of Artificial Sequence: Synthetic peptide
MDLEGKQGNFKNLREFVFKNIDGYF

SEQ ID NO: 13865 - protein, 25 aa, synthetic construct
  REGION 1..25: note = Description of Artificial Sequence: Synthetic peptide
DAGFIKQYGDCLGDIAARDLICAQK

SEQ ID NO: 13866 - protein, 25 aa, synthetic construct
  REGION 1..25: note = Description of Artificial Sequence: Synthetic peptide
MKDLSPRWYFYYLGTGPEAGLPYGA

SEQ ID NO: 13867 - protein, 25 aa, synthetic construct
  REGION 1..25: note = Description of Artificial Sequence: Synthetic peptide
KDLSPRWYFYYLGTGPEAGLPYGAN

SEQ ID NO: 13868 - protein, 25 aa, synthetic construct
  REGION 1..25: note = Description of Artificial Sequence: Synthetic peptide
KMKDLSPRWYFYYLGTGPEAGLPYG

SEQ ID NO: 13869 - protein, 25 aa, synthetic construct
  REGION 1..25: note = Description of Artificial Sequence: Synthetic peptide
GKMKDLSPRWYFYYLGTGPEAGLPY

SEQ ID NO: 13870 - protein, 25 aa, synthetic construct
  REGION 1..25: note = Description of Artificial Sequence: Synthetic peptide
DLSPRWYFYYLGTGPEAGLPYGANK

SEQ ID NO: 13871 - protein, 25 aa, synthetic construct
  REGION 1..25: note = Description of Artificial Sequence: Synthetic peptide
SEFRVYSSANNCTFEYVSQPFLMDL

SEQ ID NO: 13872 - protein, 25 aa, synthetic construct
  REGION 1..25: note = Description of Artificial Sequence: Synthetic peptide
QSLENVAFNVVNKGHFDGQQGEVPV

SEQ ID NO: 13873 - protein, 25 aa, synthetic construct
  REGION 1..25: note = Description of Artificial Sequence: Synthetic peptide
LQSLENVAFNVVNKGHFDGQQGEVP

SEQ ID NO: 13874 - protein, 25 aa, synthetic construct
  REGION 1..25: note = Description of Artificial Sequence: Synthetic peptide
SHRFYRLANECAQVLSEMVMCGGSL

SEQ ID NO: 13875 - protein, 25 aa, synthetic construct
  REGION 1..25: note = Description of Artificial Sequence: Synthetic peptide
GCVIAWNSNNLDSKVGGNYNYLYRL

SEQ ID NO: 13876 - protein, 25 aa, synthetic construct
  REGION 1..25: note = Description of Artificial Sequence: Synthetic peptide
HEETIYNLLKDCPAVAKHDFFKFRI

SEQ ID NO: 13877 - protein, 25 aa, synthetic construct
  REGION 1..25: note = Description of Artificial Sequence: Synthetic peptide
EETIYNLLKDCPAVAKHDFFKFRID

SEQ ID NO: 13878 - protein, 25 aa, synthetic construct
  REGION 1..25: note = Description of Artificial Sequence: Synthetic peptide
SLVLARKHTTCCSLSHRFYRLANEC

SEQ ID NO: 13879 - protein, 25 aa, synthetic construct
  REGION 1..25: note = Description of Artificial Sequence: Synthetic peptide
LVLARKHTTCCSLSHRFYRLANECA

SEQ ID NO: 13880 - protein, 25 aa, synthetic construct
  REGION 1..25: note = Description of Artificial Sequence: Synthetic peptide
FFKFRIDGDMVPHISRQRLTKYTMA

SEQ ID NO: 13881 - protein, 25 aa, synthetic construct
  REGION 1..25: note = Description of Artificial Sequence: Synthetic peptide
FKFRIDGDMVPHISRQRLTKYTMAD

SEQ ID NO: 13882 - protein, 25 aa, synthetic construct
  REGION 1..25: note = Description of Artificial Sequence: Synthetic peptide
FRIDGDMVPHISRQRLTKYTMADLV

SEQ ID NO: 13883 - protein, 25 aa, synthetic construct
  REGION 1..25: note = Description of Artificial Sequence: Synthetic peptide
RIDGDMVPHISRQRLTKYTMADLVY

SEQ ID NO: 13884 - protein, 25 aa, synthetic construct
  REGION 1..25: note = Description of Artificial Sequence: Synthetic peptide
DFFKFRIDGDMVPHISRQRLTKYTM

SEQ ID NO: 13885 - protein, 25 aa, synthetic construct
  REGION 1..25: note = Description of Artificial Sequence: Synthetic peptide
KFRIDGDMVPHISRQRLTKYTMADL

SEQ ID NO: 13886 - protein, 25 aa, synthetic construct
  REGION 1..25: note = Description of Artificial Sequence: Synthetic peptide
RIMASLVLARKHTTCCSLSHRFYRL

SEQ ID NO: 13887 - protein, 25 aa, synthetic construct
  REGION 1..25: note = Description of Artificial Sequence: Synthetic peptide
IMASLVLARKHTTCCSLSHRFYRLA

SEQ ID NO: 13888 - protein, 25 aa, synthetic construct
  REGION 1..25: note = Description of Artificial Sequence: Synthetic peptide
LRIMASLVLARKHTTCCSLSHRFYR

SEQ ID NO: 13889 - protein, 25 aa, synthetic construct
  REGION 1..25: note = Description of Artificial Sequence: Synthetic peptide
ASLVLARKHTTCCSLSHRFYRLANE

SEQ ID NO: 13890 - protein, 25 aa, synthetic construct
  REGION 1..25: note = Description of Artificial Sequence: Synthetic peptide
MASLVLARKHTTCCSLSHRFYRLAN

SEQ ID NO: 13891 - protein, 25 aa, synthetic construct
  REGION 1..25: note = Description of Artificial Sequence: Synthetic peptide
YVRNLQHRLYECLYRNRDVDTDFVN

SEQ ID NO: 13892 - protein, 25 aa, synthetic construct
  REGION 1..25: note = Description of Artificial Sequence: Synthetic peptide
KYVRNLQHRLYECLYRNRDVDTDFV

SEQ ID NO: 13893 - protein, 25 aa, synthetic construct
  REGION 1..25: note = Description of Artificial Sequence: Synthetic peptide
DKYVRNLQHRLYECLYRNRDVDTDF

SEQ ID NO: 13894 - protein, 25 aa, synthetic construct
  REGION 1..25: note = Description of Artificial Sequence: Synthetic peptide
CSNLLLQYGSFCTQLNRALTGIAVE

SEQ ID NO: 13895 - protein, 25 aa, synthetic construct
  REGION 1..25: note = Description of Artificial Sequence: Synthetic peptide
FLAFVVFLLVTLAILTALRLCAYCC

SEQ ID NO: 13896 - protein, 25 aa, synthetic construct
  REGION 1..25: note = Description of Artificial Sequence: Synthetic peptide
LLFLAFVVFLLVTLAILTALRLCAY

SEQ ID NO: 13897 - protein, 25 aa, synthetic construct
  REGION 1..25: note = Description of Artificial Sequence: Synthetic peptide
LFLAFVVFLLVTLAILTALRLCAYC

SEQ ID NO: 13898 - protein, 25 aa, synthetic construct
  REGION 1..25: note = Description of Artificial Sequence: Synthetic peptide
NARLRAKHYVYIGDPAQLPAPRTLL

SEQ ID NO: 13899 - protein, 25 aa, synthetic construct
  REGION 1..25: note = Description of Artificial Sequence: Synthetic peptide
VIRGDEVRQIAPGQTGKIADYNYKL

SEQ ID NO: 13900 - protein, 25 aa, synthetic construct
  REGION 1..25: note = Description of Artificial Sequence: Synthetic peptide
RGDEVRQIAPGQTGKIADYNYKLPD

SEQ ID NO: 13901 - protein, 25 aa, synthetic construct
  REGION 1..25: note = Description of Artificial Sequence: Synthetic peptide
FVIRGDEVRQIAPGQTGKIADYNYK

SEQ ID NO: 13902 - protein, 25 aa, synthetic construct
  REGION 1..25: note = Description of Artificial Sequence: Synthetic peptide
IRGDEVRQIAPGQTGKIADYNYKLP

SEQ ID NO: 13903 - protein, 25 aa, synthetic construct
  REGION 1..25: note = Description of Artificial Sequence: Synthetic peptide
TLLPAADLDDFSKQLQQSMSSADST

SEQ ID NO: 13904 - protein, 25 aa, synthetic construct
  REGION 1..25: note = Description of Artificial Sequence: Synthetic peptide
LLPAADLDDFSKQLQQSMSSADSTQ

SEQ ID NO: 13905 - protein, 25 aa, synthetic construct
  REGION 1..25: note = Description of Artificial Sequence: Synthetic peptide
VTLLPAADLDDFSKQLQQSMSSADS

SEQ ID NO: 13906 - protein, 25 aa, synthetic construct
  REGION 1..25: note = Description of Artificial Sequence: Synthetic peptide
RLITGRLQSLQTYVTQQLIRAAEIR

SEQ ID NO: 13907 - protein, 25 aa, synthetic construct
  REGION 1..25: note = Description of Artificial Sequence: Synthetic peptide
LITGRLQSLQTYVTQQLIRAAEIRA

SEQ ID NO: 13908 - protein, 25 aa, synthetic construct
  REGION 1..25: note = Description of Artificial Sequence: Synthetic peptide
DRLITGRLQSLQTYVTQQLIRAAEI

SEQ ID NO: 13909 - protein, 25 aa, synthetic construct
  REGION 1..25: note = Description of Artificial Sequence: Synthetic peptide
DFVNEFYAYLRKHFSMMILSDDAVV

SEQ ID NO: 13910 - protein, 25 aa, synthetic construct
  REGION 1..25: note = Description of Artificial Sequence: Synthetic peptide
YDSMSYEDQDALFAYTKRNVIPTIT

SEQ ID NO: 13911 - protein, 25 aa, synthetic construct
  REGION 1..25: note = Description of Artificial Sequence: Synthetic peptide
NSAIGKIQDSLSSTASALGKLQDVV

SEQ ID NO: 13912 - protein, 25 aa, synthetic construct
  REGION 1..25: note = Description of Artificial Sequence: Synthetic peptide
FNSAIGKIQDSLSSTASALGKLQDV

SEQ ID NO: 13913 - protein, 25 aa, synthetic construct
  REGION 1..25: note = Description of Artificial Sequence: Synthetic peptide
QFNSAIGKIQDSLSSTASALGKLQD

SEQ ID NO: 13914 - protein, 25 aa, synthetic construct
  REGION 1..25: note = Description of Artificial Sequence: Synthetic peptide
NQFNSAIGKIQDSLSSTASALGKLQ

SEQ ID NO: 13915 - protein, 25 aa, synthetic construct
  REGION 1..25: note = Description of Artificial Sequence: Synthetic peptide
PVPEVKILNNLGVDIAANTVIWDYK

SEQ ID NO: 13916 - protein, 25 aa, synthetic construct
  REGION 1..25: note = Description of Artificial Sequence: Synthetic peptide
NPDILRVYANLGERVRQALLKTVQF

SEQ ID NO: 13917 - protein, 25 aa, synthetic construct
  REGION 1..25: note = Description of Artificial Sequence: Synthetic peptide
KWYIRVGARKSAPLIELCVDEAGSK

SEQ ID NO: 13918 - protein, 25 aa, synthetic construct
  REGION 1..25: note = Description of Artificial Sequence: Synthetic peptide
LQPRTFLLKYNENGTITDAVDCALD

SEQ ID NO: 13919 - protein, 25 aa, synthetic construct
  REGION 1..25: note = Description of Artificial Sequence: Synthetic peptide
VSDIDYVPLKSATCITRCNLGGAVC

SEQ ID NO: 13920 - protein, 25 aa, synthetic construct
  REGION 1..25: note = Description of Artificial Sequence: Synthetic peptide
FAIGLALYYPSARIVYTACSHAAVD

SEQ ID NO: 13921 - protein, 25 aa, synthetic construct
  REGION 1..25: note = Description of Artificial Sequence: Synthetic peptide
AFELWAKRNIKPVPEVKILNNLGVD

SEQ ID NO: 13922 - protein, 25 aa, synthetic construct
  REGION 1..25: note = Description of Artificial Sequence: Synthetic peptide
FELWAKRNIKPVPEVKILNNLGVDI

SEQ ID NO: 13923 - protein, 25 aa, synthetic construct
  REGION 1..25: note = Description of Artificial Sequence: Synthetic peptide
TLPKGIMMNVAKYTQLCQYLNTLTL

SEQ ID NO: 13924 - protein, 25 aa, synthetic construct
  REGION 1..25: note = Description of Artificial Sequence: Synthetic peptide
DSYFVVKRHTFSNYQHEETIYNLLK

SEQ ID NO: 13925 - protein, 25 aa, synthetic construct
  REGION 1..25: note = Description of Artificial Sequence: Synthetic peptide
VLNDILSRLDKVEAEVQIDRLITGR

SEQ ID NO: 13926 - protein, 25 aa, synthetic construct
  REGION 1..25: note = Description of Artificial Sequence: Synthetic peptide
SVLNDILSRLDKVEAEVQIDRLITG

SEQ ID NO: 13927 - protein, 25 aa, synthetic construct
  REGION 1..25: note = Description of Artificial Sequence: Synthetic peptide
ISSVLNDILSRLDKVEAEVQIDRLI

SEQ ID NO: 13928 - protein, 25 aa, synthetic construct
  REGION 1..25: note = Description of Artificial Sequence: Synthetic peptide
SSVLNDILSRLDKVEAEVQIDRLIT

SEQ ID NO: 13929 - protein, 25 aa, synthetic construct
  REGION 1..25: note = Description of Artificial Sequence: Synthetic peptide
AISSVLNDILSRLDKVEAEVQIDRL

SEQ ID NO: 13930 - protein, 25 aa, synthetic construct
  REGION 1..25: note = Description of Artificial Sequence: Synthetic peptide
IVVFDEISMATNYDLSVVNARLRAK

SEQ ID NO: 13931 - protein, 25 aa, synthetic construct
  REGION 1..25: note = Description of Artificial Sequence: Synthetic peptide
VFDEISMATNYDLSVVNARLRAKHY

SEQ ID NO: 13932 - protein, 25 aa, synthetic construct
  REGION 1..25: note = Description of Artificial Sequence: Synthetic peptide
VVFDEISMATNYDLSVVNARLRAKH

SEQ ID NO: 13933 - protein, 25 aa, synthetic construct
  REGION 1..25: note = Description of Artificial Sequence: Synthetic peptide
CDGGSLYVNKHAFHTPAFDKSAFVN

SEQ ID NO: 13934 - protein, 25 aa, synthetic construct
  REGION 1..25: note = Description of Artificial Sequence: Synthetic peptide
DGGSLYVNKHAFHTPAFDKSAFVNL

SEQ ID NO: 13935 - protein, 25 aa, synthetic construct
  REGION 1..25: note = Description of Artificial Sequence: Synthetic peptide
LSNLNLPGCDGGSLYVNKHAFHTPA

SEQ ID NO: 13936 - protein, 25 aa, synthetic construct
  REGION 1..25: note = Description of Artificial Sequence: Synthetic peptide
SNLNLPGCDGGSLYVNKHAFHTPAF

SEQ ID NO: 13937 - protein, 25 aa, synthetic construct
  REGION 1..25: note = Description of Artificial Sequence: Synthetic peptide
EGVFVSNGTHWFVTQRNFYEPQIIT

SEQ ID NO: 13938 - protein, 25 aa, synthetic construct
  REGION 1..25: note = Description of Artificial Sequence: Synthetic peptide
YGDCLGDIAARDLICAQKFNGLTVL

SEQ ID NO: 13939 - protein, 25 aa, synthetic construct
  REGION 1..25: note = Description of Artificial Sequence: Synthetic peptide
QYGDCLGDIAARDLICAQKFNGLTV

SEQ ID NO: 13940 - protein, 25 aa, synthetic construct
  REGION 1..25: note = Description of Artificial Sequence: Synthetic peptide
KQYGDCLGDIAARDLICAQKFNGLT

SEQ ID NO: 13941 - protein, 25 aa, synthetic construct
  REGION 1..25: note = Description of Artificial Sequence: Synthetic peptide
ARKHTTCCSLSHRFYRLANECAQVL

SEQ ID NO: 13942 - protein, 25 aa, synthetic construct
  REGION 1..25: note = Description of Artificial Sequence: Synthetic peptide
FHLYLQYIRKLHDELTGHMLDMYSV

SEQ ID NO: 13943 - protein, 25 aa, synthetic construct
  REGION 1..25: note = Description of Artificial Sequence: Synthetic peptide
VFHLYLQYIRKLHDELTGHMLDMYS

SEQ ID NO: 13944 - protein, 25 aa, synthetic construct
  REGION 1..25: note = Description of Artificial Sequence: Synthetic peptide
FDGRVDGQVDLFRNARNGVLITEGS

SEQ ID NO: 13945 - protein, 25 aa, synthetic construct
  REGION 1..25: note = Description of Artificial Sequence: Synthetic peptide
VDGQVDLFRNARNGVLITEGSVKGL

SEQ ID NO: 13946 - protein, 25 aa, synthetic construct
  REGION 1..25: note = Description of Artificial Sequence: Synthetic peptide
RVDGQVDLFRNARNGVLITEGSVKG

SEQ ID NO: 13947 - protein, 25 aa, synthetic construct
  REGION 1..25: note = Description of Artificial Sequence: Synthetic peptide
DGRVDGQVDLFRNARNGVLITEGSV

SEQ ID NO: 13948 - protein, 25 aa, synthetic construct
  REGION 1..25: note = Description of Artificial Sequence: Synthetic peptide
GRVDGQVDLFRNARNGVLITEGSVK

SEQ ID NO: 13949 - protein, 25 aa, synthetic construct
  REGION 1..25: note = Description of Artificial Sequence: Synthetic peptide
SINFVRIIMRLWLCWKCRSKNPLLY

SEQ ID NO: 13950 - protein, 25 aa, synthetic construct
  REGION 1..25: note = Description of Artificial Sequence: Synthetic peptide
QSINFVRIIMRLWLCWKCRSKNPLL

SEQ ID NO: 13951 - protein, 25 aa, synthetic construct
  REGION 1..25: note = Description of Artificial Sequence: Synthetic peptide
FNKKDWYDFVENPDILRVYANLGER

SEQ ID NO: 13952 - protein, 25 aa, synthetic construct
  REGION 1..25: note = Description of Artificial Sequence: Synthetic peptide
THWFVTQRNFYEPQIITTDNTFVSG

SEQ ID NO: 13953 - protein, 25 aa, synthetic construct
  REGION 1..25: note = Description of Artificial Sequence: Synthetic peptide
YDHVISTSHKLVLSVNPYVCNAPGC

SEQ ID NO: 13954 - protein, 25 aa, synthetic construct
  REGION 1..25: note = Description of Artificial Sequence: Synthetic peptide
CYDHVISTSHKLVLSVNPYVCNAPG

SEQ ID NO: 13955 - protein, 25 aa, synthetic construct
  REGION 1..25: note = Description of Artificial Sequence: Synthetic peptide
RRPFLCCKCCYDHVISTSHKLVLSV

SEQ ID NO: 13956 - protein, 25 aa, synthetic construct
  REGION 1..25: note = Description of Artificial Sequence: Synthetic peptide
IRRPFLCCKCCYDHVISTSHKLVLS

SEQ ID NO: 13957 - protein, 25 aa, synthetic construct
  REGION 1..25: note = Description of Artificial Sequence: Synthetic peptide
YFLQSINFVRIIMRLWLCWKCRSKN

SEQ ID NO: 13958 - protein, 25 aa, synthetic construct
  REGION 1..25: note = Description of Artificial Sequence: Synthetic peptide
DDIVKTDGTLMIERFVSLAIDAYPL

SEQ ID NO: 13959 - protein, 25 aa, synthetic construct
  REGION 1..25: note = Description of Artificial Sequence: Synthetic peptide
SANNCTFEYVSQPFLMDLEGKQGNF

SEQ ID NO: 13960 - protein, 25 aa, synthetic construct
  REGION 1..25: note = Description of Artificial Sequence: Synthetic peptide
ANNCTFEYVSQPFLMDLEGKQGNFK

SEQ ID NO: 13961 - protein, 25 aa, synthetic construct
  REGION 1..25: note = Description of Artificial Sequence: Synthetic peptide
SSANNCTFEYVSQPFLMDLEGKQGN

SEQ ID NO: 13962 - protein, 25 aa, synthetic construct
  REGION 1..25: note = Description of Artificial Sequence: Synthetic peptide
PRTLLTKGTLEPEYFNSVCRLMKTI

SEQ ID NO: 13963 - protein, 25 aa, synthetic construct
  REGION 1..25: note = Description of Artificial Sequence: Synthetic peptide
AQLPAPRTLLTKGTLEPEYFNSVCR

SEQ ID NO: 13964 - protein, 25 aa, synthetic construct
  REGION 1..25: note = Description of Artificial Sequence: Synthetic peptide
QLPAPRTLLTKGTLEPEYFNSVCRL

SEQ ID NO: 13965 - protein, 25 aa, synthetic construct
  REGION 1..25: note = Description of Artificial Sequence: Synthetic peptide
WHHSIGFDYVYNPFMIDVQQWGFTG

SEQ ID NO: 13966 - protein, 25 aa, synthetic construct
  REGION 1..25: note = Description of Artificial Sequence: Synthetic peptide
YACWHHSIGFDYVYNPFMIDVQQWG

SEQ ID NO: 13967 - protein, 25 aa, synthetic construct
  REGION 1..25: note = Description of Artificial Sequence: Synthetic peptide
CWHHSIGFDYVYNPFMIDVQQWGFT

SEQ ID NO: 13968 - protein, 25 aa, synthetic construct
  REGION 1..25: note = Description of Artificial Sequence: Synthetic peptide
HHSIGFDYVYNPFMIDVQQWGFTGN

SEQ ID NO: 13969 - protein, 25 aa, synthetic construct
  REGION 1..25: note = Description of Artificial Sequence: Synthetic peptide
ACWHHSIGFDYVYNPFMIDVQQWGF

SEQ ID NO: 13970 - protein, 25 aa, synthetic construct
  REGION 1..25: note = Description of Artificial Sequence: Synthetic peptide
VDSSQGSEYDYVIFTQTTETAHSCN

SEQ ID NO: 13971 - protein, 25 aa, synthetic construct
  REGION 1..25: note = Description of Artificial Sequence: Synthetic peptide
SSQGSEYDYVIFTQTTETAHSCNVN

SEQ ID NO: 13972 - protein, 25 aa, synthetic construct
  REGION 1..25: note = Description of Artificial Sequence: Synthetic peptide
DSSQGSEYDYVIFTQTTETAHSCNV

SEQ ID NO: 13973 - protein, 25 aa, synthetic construct
  REGION 1..25: note = Description of Artificial Sequence: Synthetic peptide
FHPLADNKFALTCFSTQFAFACPDG

SEQ ID NO: 13974 - protein, 25 aa, synthetic construct
  REGION 1..25: note = Description of Artificial Sequence: Synthetic peptide
KWADNNCYLATALLTLQQIELKFNP

SEQ ID NO: 13975 - protein, 25 aa, synthetic construct
  REGION 1..25: note = Description of Artificial Sequence: Synthetic peptide
WADNNCYLATALLTLQQIELKFNPP

SEQ ID NO: 13976 - protein, 25 aa, synthetic construct
  REGION 1..25: note = Description of Artificial Sequence: Synthetic peptide
DNNCYLATALLTLQQIELKFNPPAL

SEQ ID NO: 13977 - protein, 25 aa, synthetic construct
  REGION 1..25: note = Description of Artificial Sequence: Synthetic peptide
SIKWADNNCYLATALLTLQQIELKF

SEQ ID NO: 13978 - protein, 25 aa, synthetic construct
  REGION 1..25: note = Description of Artificial Sequence: Synthetic peptide
ADNNCYLATALLTLQQIELKFNPPA

SEQ ID NO: 13979 - protein, 25 aa, synthetic construct
  REGION 1..25: note = Description of Artificial Sequence: Synthetic peptide
IKWADNNCYLATALLTLQQIELKFN

SEQ ID NO: 13980 - protein, 25 aa, synthetic construct
  REGION 1..25: note = Description of Artificial Sequence: Synthetic peptide
ITNLCPFGEVFNATRFASVYAWNRK

SEQ ID NO: 13981 - protein, 25 aa, synthetic construct
  REGION 1..25: note = Description of Artificial Sequence: Synthetic peptide
PLADNKFALTCFSTQFAFACPDGVK

SEQ ID NO: 13982 - protein, 25 aa, synthetic construct
  REGION 1..25: note = Description of Artificial Sequence: Synthetic peptide
YRNRDVDTDFVNEFYAYLRKHFSMM

SEQ ID NO: 13983 - protein, 25 aa, synthetic construct
  REGION 1..25: note = Description of Artificial Sequence: Synthetic peptide
RNRDVDTDFVNEFYAYLRKHFSMMI

SEQ ID NO: 13984 - protein, 25 aa, synthetic construct
  REGION 1..25: note = Description of Artificial Sequence: Synthetic peptide
ISNCVADYSVLYNSASFSTFKCYGV

SEQ ID NO: 13985 - protein, 25 aa, synthetic construct
  REGION 1..25: note = Description of Artificial Sequence: Synthetic peptide
FFSNYLKRRVVFNGVSFSTFEEAAL

SEQ ID NO: 13986 - protein, 25 aa, synthetic construct
  REGION 1..25: note = Description of Artificial Sequence: Synthetic peptide
FSNYLKRRVVFNGVSFSTFEEAALC

SEQ ID NO: 13987 - protein, 25 aa, synthetic construct
  REGION 1..25: note = Description of Artificial Sequence: Synthetic peptide
NCVADYSVLYNSASFSTFKCYGVSP

SEQ ID NO: 13988 - protein, 25 aa, synthetic construct
  REGION 1..25: note = Description of Artificial Sequence: Synthetic peptide
SNCVADYSVLYNSASFSTFKCYGVS

SEQ ID NO: 13989 - protein, 25 aa, synthetic construct
  REGION 1..25: note = Description of Artificial Sequence: Synthetic peptide
CVADYSVLYNSASFSTFKCYGVSPT

SEQ ID NO: 13990 - protein, 25 aa, synthetic construct
  REGION 1..25: note = Description of Artificial Sequence: Synthetic peptide
VLKSEDAQGMDNLACEDLKPVSEEV

SEQ ID NO: 13991 - protein, 25 aa, synthetic construct
  REGION 1..25: note = Description of Artificial Sequence: Synthetic peptide
LTGYKKPASRELKVTFFPDLNGDVV

SEQ ID NO: 13992 - protein, 25 aa, synthetic construct
  REGION 1..25: note = Description of Artificial Sequence: Synthetic peptide
TSKFYGGWHNMLKTVYSDVENPHLM

SEQ ID NO: 13993 - protein, 25 aa, synthetic construct
  REGION 1..25: note = Description of Artificial Sequence: Synthetic peptide
YVLPNDDTLRVEAFEYYHTTDPSFL

SEQ ID NO: 13994 - protein, 25 aa, synthetic construct
  REGION 1..25: note = Description of Artificial Sequence: Synthetic peptide
VLPNDDTLRVEAFEYYHTTDPSFLG

SEQ ID NO: 13995 - protein, 25 aa, synthetic construct
  REGION 1..25: note = Description of Artificial Sequence: Synthetic peptide
GHTDLMAAYVDNSSLTIKKPNELSR

SEQ ID NO: 13996 - protein, 25 aa, synthetic construct
  REGION 1..25: note = Description of Artificial Sequence: Synthetic peptide
DIAARDLICAQKFNGLTVLPPLLTD

SEQ ID NO: 13997 - protein, 25 aa, synthetic construct
  REGION 1..25: note = Description of Artificial Sequence: Synthetic peptide
GDIAARDLICAQKFNGLTVLPPLLT

SEQ ID NO: 13998 - protein, 25 aa, synthetic construct
  REGION 1..25: note = Description of Artificial Sequence: Synthetic peptide
LGDIAARDLICAQKFNGLTVLPPLL

SEQ ID NO: 13999 - protein, 25 aa, synthetic construct
  REGION 1..25: note = Description of Artificial Sequence: Synthetic peptide
DKRAKVTSAMQTMLFTMLRKLDNDA

SEQ ID NO: 14000 - protein, 25 aa, synthetic construct
  REGION 1..25: note = Description of Artificial Sequence: Synthetic peptide
ATHGLAAVNSVPWDTIANYAKPFLN

SEQ ID NO: 14001 - protein, 25 aa, synthetic construct
  REGION 1..25: note = Description of Artificial Sequence: Synthetic peptide
NDVSFLAHIQWMVMFTPLVPFWITI

SEQ ID NO: 14002 - protein, 25 aa, synthetic construct
  REGION 1..25: note = Description of Artificial Sequence: Synthetic peptide
MFLARGIVFMCVEYCPIFFITGNTL

SEQ ID NO: 14003 - protein, 25 aa, synthetic construct
  REGION 1..25: note = Description of Artificial Sequence: Synthetic peptide
PDVDLGDISGINASVVNIQKEIDRL

SEQ ID NO: 14004 - protein, 25 aa, synthetic construct
  REGION 1..25: note = Description of Artificial Sequence: Synthetic peptide
VDLGDISGINASVVNIQKEIDRLNE

SEQ ID NO: 14005 - protein, 25 aa, synthetic construct
  REGION 1..25: note = Description of Artificial Sequence: Synthetic peptide
DVDLGDISGINASVVNIQKEIDRLN

SEQ ID NO: 14006 - protein, 25 aa, synthetic construct
  REGION 1..25: note = Description of Artificial Sequence: Synthetic peptide
SPDVDLGDISGINASVVNIQKEIDR

SEQ ID NO: 14007 - protein, 25 aa, synthetic construct
  REGION 1..25: note = Description of Artificial Sequence: Synthetic peptide
EDKRAKVTSAMQTMLFTMLRKLDND

SEQ ID NO: 14008 - protein, 25 aa, synthetic construct
  REGION 1..25: note = Description of Artificial Sequence: Synthetic peptide
EEVTTTLEETKFLTENLLLYIDING

SEQ ID NO: 14009 - protein, 25 aa, synthetic construct
  REGION 1..25: note = Description of Artificial Sequence: Synthetic peptide
QLFFSYFAVHFISNSWLMWLIINLV

SEQ ID NO: 14010 - protein, 25 aa, synthetic construct
  REGION 1..25: note = Description of Artificial Sequence: Synthetic peptide
LFFSYFAVHFISNSWLMWLIINLVQ

SEQ ID NO: 14011 - protein, 25 aa, synthetic construct
  REGION 1..25: note = Description of Artificial Sequence: Synthetic peptide
FFSYFAVHFISNSWLMWLIINLVQM

SEQ ID NO: 14012 - protein, 25 aa, synthetic construct
  REGION 1..25: note = Description of Artificial Sequence: Synthetic peptide
MQLFFSYFAVHFISNSWLMWLIINL

SEQ ID NO: 14013 - protein, 25 aa, synthetic construct
  REGION 1..25: note = Description of Artificial Sequence: Synthetic peptide
FSYFAVHFISNSWLMWLIINLVQMA

SEQ ID NO: 14014 - protein, 25 aa, synthetic construct
  REGION 1..25: note = Description of Artificial Sequence: Synthetic peptide
CIPYNSVTSSIVITSGDGTTSPISE

SEQ ID NO: 14015 - protein, 25 aa, synthetic construct
  REGION 1..25: note = Description of Artificial Sequence: Synthetic peptide
PDKVFRSSVLHSTQDLFLPFFSNVT

SEQ ID NO: 14016 - protein, 25 aa, synthetic construct
  REGION 1..25: note = Description of Artificial Sequence: Synthetic peptide
NCTFEYVSQPFLMDLEGKQGNFKNL

SEQ ID NO: 14017 - protein, 25 aa, synthetic construct
  REGION 1..25: note = Description of Artificial Sequence: Synthetic peptide
LTSHTVMPLSAPTLVPQEHYVRITG

SEQ ID NO: 14018 - protein, 25 aa, synthetic construct
  REGION 1..25: note = Description of Artificial Sequence: Synthetic peptide
TSHTVMPLSAPTLVPQEHYVRITGL

SEQ ID NO: 14019 - protein, 25 aa, synthetic construct
  REGION 1..25: note = Description of Artificial Sequence: Synthetic peptide
LWLLWPVTLACFVLAAVYRINWITG

SEQ ID NO: 14020 - protein, 25 aa, synthetic construct
  REGION 1..25: note = Description of Artificial Sequence: Synthetic peptide
WLLWPVTLACFVLAAVYRINWITGG

SEQ ID NO: 14021 - protein, 25 aa, synthetic construct
  REGION 1..25: note = Description of Artificial Sequence: Synthetic peptide
WPVTLACFVLAAVYRINWITGGIAI

SEQ ID NO: 14022 - protein, 25 aa, synthetic construct
  REGION 1..25: note = Description of Artificial Sequence: Synthetic peptide
LLWPVTLACFVLAAVYRINWITGGI

SEQ ID NO: 14023 - protein, 25 aa, synthetic construct
  REGION 1..25: note = Description of Artificial Sequence: Synthetic peptide
LWPVTLACFVLAAVYRINWITGGIA

SEQ ID NO: 14024 - protein, 25 aa, synthetic construct
  REGION 1..25: note = Description of Artificial Sequence: Synthetic peptide
VFTTVDNINLHTQVVDMSMTYGQQF

SEQ ID NO: 14025 - protein, 25 aa, synthetic construct
  REGION 1..25: note = Description of Artificial Sequence: Synthetic peptide
FTTVDNINLHTQVVDMSMTYGQQFG

SEQ ID NO: 14026 - protein, 25 aa, synthetic construct
  REGION 1..25: note = Description of Artificial Sequence: Synthetic peptide
IKVFTTVDNINLHTQVVDMSMTYGQ

SEQ ID NO: 14027 - protein, 25 aa, synthetic construct
  REGION 1..25: note = Description of Artificial Sequence: Synthetic peptide
TTVDNINLHTQVVDMSMTYGQQFGP

SEQ ID NO: 14028 - protein, 25 aa, synthetic construct
  REGION 1..25: note = Description of Artificial Sequence: Synthetic peptide
TVDNINLHTQVVDMSMTYGQQFGPT

SEQ ID NO: 14029 - protein, 25 aa, synthetic construct
  REGION 1..25: note = Description of Artificial Sequence: Synthetic peptide
KVFTTVDNINLHTQVVDMSMTYGQQ

SEQ ID NO: 14030 - protein, 25 aa, synthetic construct
  REGION 1..25: note = Description of Artificial Sequence: Synthetic peptide
APFLYLYALVYFLQSINFVRIIMRL

SEQ ID NO: 14031 - protein, 25 aa, synthetic construct
  REGION 1..25: note = Description of Artificial Sequence: Synthetic peptide
LSSNFGAISSVLNDILSRLDKVEAE

SEQ ID NO: 14032 - protein, 25 aa, synthetic construct
  REGION 1..25: note = Description of Artificial Sequence: Synthetic peptide
VNALPETTADIVVFDEISMATNYDL

SEQ ID NO: 14033 - protein, 25 aa, synthetic construct
  REGION 1..25: note = Description of Artificial Sequence: Synthetic peptide
SETKCTLKSFTVEKGIYQTSNFRVQ

SEQ ID NO: 14034 - protein, 25 aa, synthetic construct
  REGION 1..25: note = Description of Artificial Sequence: Synthetic peptide
QNCVLKLKVDTANPKTPKYKFVRIQ

SEQ ID NO: 14035 - protein, 25 aa, synthetic construct
  REGION 1..25: note = Description of Artificial Sequence: Synthetic peptide
GHSMQNCVLKLKVDTANPKTPKYKF

SEQ ID NO: 14036 - protein, 25 aa, synthetic construct
  REGION 1..25: note = Description of Artificial Sequence: Synthetic peptide
MQNCVLKLKVDTANPKTPKYKFVRI

SEQ ID NO: 14037 - protein, 25 aa, synthetic construct
  REGION 1..25: note = Description of Artificial Sequence: Synthetic peptide
NCVLKLKVDTANPKTPKYKFVRIQP

SEQ ID NO: 14038 - protein, 25 aa, synthetic construct
  REGION 1..25: note = Description of Artificial Sequence: Synthetic peptide
SMQNCVLKLKVDTANPKTPKYKFVR

SEQ ID NO: 14039 - protein, 25 aa, synthetic construct
  REGION 1..25: note = Description of Artificial Sequence: Synthetic peptide
HSMQNCVLKLKVDTANPKTPKYKFV

SEQ ID NO: 14040 - protein, 25 aa, synthetic construct
  REGION 1..25: note = Description of Artificial Sequence: Synthetic peptide
IGHSMQNCVLKLKVDTANPKTPKYK

SEQ ID NO: 14041 - protein, 25 aa, synthetic construct
  REGION 1..25: note = Description of Artificial Sequence: Synthetic peptide
TDQSSYIVDSVTVKNGSIHLYFDKA

SEQ ID NO: 14042 - protein, 25 aa, synthetic construct
  REGION 1..25: note = Description of Artificial Sequence: Synthetic peptide
DQSSYIVDSVTVKNGSIHLYFDKAG

SEQ ID NO: 14043 - protein, 25 aa, synthetic construct
  REGION 1..25: note = Description of Artificial Sequence: Synthetic peptide
QSSYIVDSVTVKNGSIHLYFDKAGQ

SEQ ID NO: 14044 - protein, 25 aa, synthetic construct
  REGION 1..25: note = Description of Artificial Sequence: Synthetic peptide
SRILGAGCFVDDIVKTDGTLMIERF

SEQ ID NO: 14045 - protein, 25 aa, synthetic construct
  REGION 1..25: note = Description of Artificial Sequence: Synthetic peptide
RILGAGCFVDDIVKTDGTLMIERFV

SEQ ID NO: 14046 - protein, 25 aa, synthetic construct
  REGION 1..25: note = Description of Artificial Sequence: Synthetic peptide
AALALLLLDRLNQLESKMSGKGQQQ

SEQ ID NO: 14047 - protein, 25 aa, synthetic construct
  REGION 1..25: note = Description of Artificial Sequence: Synthetic peptide
DAALALLLLDRLNQLESKMSGKGQQ

SEQ ID NO: 14048 - protein, 25 aa, synthetic construct
  REGION 1..25: note = Description of Artificial Sequence: Synthetic peptide
SLRLIDAMMFTSDLATNNLVVMAYI

SEQ ID NO: 14049 - protein, 25 aa, synthetic construct
  REGION 1..25: note = Description of Artificial Sequence: Synthetic peptide
RLIDAMMFTSDLATNNLVVMAYITG

SEQ ID NO: 14050 - protein, 25 aa, synthetic construct
  REGION 1..25: note = Description of Artificial Sequence: Synthetic peptide
LRLIDAMMFTSDLATNNLVVMAYIT

SEQ ID NO: 14051 - protein, 25 aa, synthetic construct
  REGION 1..25: note = Description of Artificial Sequence: Synthetic peptide
LIDAMMFTSDLATNNLVVMAYITGG

SEQ ID NO: 14052 - protein, 25 aa, synthetic construct
  REGION 1..25: note = Description of Artificial Sequence: Synthetic peptide
YPDPSRILGAGCFVDDIVKTDGTLM

SEQ ID NO: 14053 - protein, 25 aa, synthetic construct
  REGION 1..25: note = Description of Artificial Sequence: Synthetic peptide
PDPSRILGAGCFVDDIVKTDGTLMI

SEQ ID NO: 14054 - protein, 25 aa, synthetic construct
  REGION 1..25: note = Description of Artificial Sequence: Synthetic peptide
PTESIVRFPNITNLCPFGEVFNATR

SEQ ID NO: 14055 - protein, 25 aa, synthetic construct
  REGION 1..25: note = Description of Artificial Sequence: Synthetic peptide
VNVSLVKPSFYVYSRVKNLNSSRVP

SEQ ID NO: 14056 - protein, 25 aa, synthetic construct
  REGION 1..25: note = Description of Artificial Sequence: Synthetic peptide
IVNVSLVKPSFYVYSRVKNLNSSRV

SEQ ID NO: 14057 - protein, 25 aa, synthetic construct
  REGION 1..25: note = Description of Artificial Sequence: Synthetic peptide
CTGYREGYLNSTNVTIATYCTGSIP

SEQ ID NO: 14058 - protein, 25 aa, synthetic construct
  REGION 1..25: note = Description of Artificial Sequence: Synthetic peptide
IADYNYKLPDDFTGCVIAWNSNNLD

SEQ ID NO: 14059 - protein, 25 aa, synthetic construct
  REGION 1..25: note = Description of Artificial Sequence: Synthetic peptide
ATPSDFVRATATIPIQASLPFGWLI

SEQ ID NO: 14060 - protein, 25 aa, synthetic construct
  REGION 1..25: note = Description of Artificial Sequence: Synthetic peptide
ITREVGFVVPGLPGTILRTTNGDFL

SEQ ID NO: 14061 - protein, 25 aa, synthetic construct
  REGION 1..25: note = Description of Artificial Sequence: Synthetic peptide
GDISGINASVVNIQKEIDRLNEVAK

SEQ ID NO: 14062 - protein, 25 aa, synthetic construct
  REGION 1..25: note = Description of Artificial Sequence: Synthetic peptide
DISGINASVVNIQKEIDRLNEVAKN

SEQ ID NO: 14063 - protein, 25 aa, synthetic construct
  REGION 1..25: note = Description of Artificial Sequence: Synthetic peptide
DGGCINANQVIVNNLDKSAGFPFNK

SEQ ID NO: 14064 - protein, 25 aa, synthetic construct
  REGION 1..25: note = Description of Artificial Sequence: Synthetic peptide
YDGGCINANQVIVNNLDKSAGFPFN

SEQ ID NO: 14065 - protein, 25 aa, synthetic construct
  REGION 1..25: note = Description of Artificial Sequence: Synthetic peptide
NLHSSRLSFKELLVYAADPAMHAAS

SEQ ID NO: 14066 - protein, 25 aa, synthetic construct
  REGION 1..25: note = Description of Artificial Sequence: Synthetic peptide
MLDMYSVMLTNDNTSRYWEPEFYEA

SEQ ID NO: 14067 - protein, 25 aa, synthetic construct
  REGION 1..25: note = Description of Artificial Sequence: Synthetic peptide
HMLDMYSVMLTNDNTSRYWEPEFYE

SEQ ID NO: 14068 - protein, 25 aa, synthetic construct
  REGION 1..25: note = Description of Artificial Sequence: Synthetic peptide
KPSKRSFIEDLLFNKVTLADAGFIK

SEQ ID NO: 14069 - protein, 25 aa, synthetic construct
  REGION 1..25: note = Description of Artificial Sequence: Synthetic peptide
DPSKPSKRSFIEDLLFNKVTLADAG

SEQ ID NO: 14070 - protein, 25 aa, synthetic construct
  REGION 1..25: note = Description of Artificial Sequence: Synthetic peptide
PSKPSKRSFIEDLLFNKVTLADAGF

SEQ ID NO: 14071 - protein, 25 aa, synthetic construct
  REGION 1..25: note = Description of Artificial Sequence: Synthetic peptide
SKPSKRSFIEDLLFNKVTLADAGFI

SEQ ID NO: 14072 - protein, 25 aa, synthetic construct
  REGION 1..25: note = Description of Artificial Sequence: Synthetic peptide
GMEVTPSGTWLTYTGAIKLDDKDPN

SEQ ID NO: 14073 - protein, 25 aa, synthetic construct
  REGION 1..25: note = Description of Artificial Sequence: Synthetic peptide
RTIKVFTTVDNINLHTQVVDMSMTY

SEQ ID NO: 14074 - protein, 25 aa, synthetic construct
  REGION 1..25: note = Description of Artificial Sequence: Synthetic peptide
GSLAATVRLQAGNATEVPANSTVLS

SEQ ID NO: 14075 - protein, 25 aa, synthetic construct
  REGION 1..25: note = Description of Artificial Sequence: Synthetic peptide
PINLVRDLPQGFSALEPLVDLPIGI

SEQ ID NO: 14076 - protein, 25 aa, synthetic construct
  REGION 1..25: note = Description of Artificial Sequence: Synthetic peptide
DSYYSLLMPILTLTRALTAESHVDT

SEQ ID NO: 14077 - protein, 25 aa, synthetic construct
  REGION 1..25: note = Description of Artificial Sequence: Synthetic peptide
CFDKFKVNSTLEQYVFCTVNALPET

SEQ ID NO: 14078 - protein, 25 aa, synthetic construct
  REGION 1..25: note = Description of Artificial Sequence: Synthetic peptide
FDKFKVNSTLEQYVFCTVNALPETT

SEQ ID NO: 14079 - protein, 25 aa, synthetic construct
  REGION 1..25: note = Description of Artificial Sequence: Synthetic peptide
QDVNLHSSRLSFKELLVYAADPAMH

SEQ ID NO: 14080 - protein, 25 aa, synthetic construct
  REGION 1..25: note = Description of Artificial Sequence: Synthetic peptide
PFGEVFNATRFASVYAWNRKRISNC

SEQ ID NO: 14081 - protein, 25 aa, synthetic construct
  REGION 1..25: note = Description of Artificial Sequence: Synthetic peptide
FGEVFNATRFASVYAWNRKRISNCV

SEQ ID NO: 14082 - protein, 25 aa, synthetic construct
  REGION 1..25: note = Description of Artificial Sequence: Synthetic peptide
QALNTLVKQLSSNFGAISSVLNDIL

SEQ ID NO: 14083 - protein, 25 aa, synthetic construct
  REGION 1..25: note = Description of Artificial Sequence: Synthetic peptide
NRKRISNCVADYSVLYNSASFSTFK

SEQ ID NO: 14084 - protein, 25 aa, synthetic construct
  REGION 1..25: note = Description of Artificial Sequence: Synthetic peptide
KYLPIDKCSRIIPARARVECFDKFK

SEQ ID NO: 14085 - protein, 25 aa, synthetic construct
  REGION 1..25: note = Description of Artificial Sequence: Synthetic peptide
LKYLPIDKCSRIIPARARVECFDKF

SEQ ID NO: 14086 - protein, 25 aa, synthetic construct
  REGION 1..25: note = Description of Artificial Sequence: Synthetic peptide
YLPIDKCSRIIPARARVECFDKFKV

SEQ ID NO: 14087 - protein, 25 aa, synthetic construct
  REGION 1..25: note = Description of Artificial Sequence: Synthetic peptide
ALKYLPIDKCSRIIPARARVECFDK

SEQ ID NO: 14088 - protein, 25 aa, synthetic construct
  REGION 1..25: note = Description of Artificial Sequence: Synthetic peptide
LPIDKCSRIIPARARVECFDKFKVN

SEQ ID NO: 14089 - protein, 25 aa, synthetic construct
  REGION 1..25: note = Description of Artificial Sequence: Synthetic peptide
DGVYFASTEKSNIIRGWIFGTTLDS

SEQ ID NO: 14090 - protein, 25 aa, synthetic construct
  REGION 1..25: note = Description of Artificial Sequence: Synthetic peptide
VVDSYYSLLMPILTLTRALTAESHV

SEQ ID NO: 14091 - protein, 25 aa, synthetic construct
  REGION 1..25: note = Description of Artificial Sequence: Synthetic peptide
VDSYYSLLMPILTLTRALTAESHVD

SEQ ID NO: 14092 - protein, 25 aa, synthetic construct
  REGION 1..25: note = Description of Artificial Sequence: Synthetic peptide
HTNCYDYCIPYNSVTSSIVITSGDG

SEQ ID NO: 14093 - protein, 25 aa, synthetic construct
  REGION 1..25: note = Description of Artificial Sequence: Synthetic peptide
GEIKDATPSDFVRATATIPIQASLP

SEQ ID NO: 14094 - protein, 25 aa, synthetic construct
  REGION 1..25: note = Description of Artificial Sequence: Synthetic peptide
YRGTTTYKLNVGDYFVLTSHTVMPL

SEQ ID NO: 14095 - protein, 25 aa, synthetic construct
  REGION 1..25: note = Description of Artificial Sequence: Synthetic peptide
IYNDKVAGFAKFLKTNCCRFQEKDE

SEQ ID NO: 14096 - protein, 25 aa, synthetic construct
  REGION 1..25: note = Description of Artificial Sequence: Synthetic peptide
KKPRQKRTATKAYNVTQAFGRRGPE

SEQ ID NO: 14097 - protein, 25 aa, synthetic construct
  REGION 1..25: note = Description of Artificial Sequence: Synthetic peptide
PPGDQFKHLIPLMYKGLPWNVVRIK

SEQ ID NO: 14098 - protein, 25 aa, synthetic construct
  REGION 1..25: note = Description of Artificial Sequence: Synthetic peptide
FCTQLNRALTGIAVEQDKNTQEVFA

SEQ ID NO: 14099 - protein, 25 aa, synthetic construct
  REGION 1..25: note = Description of Artificial Sequence: Synthetic peptide
SFCTQLNRALTGIAVEQDKNTQEVF

SEQ ID NO: 14100 - protein, 25 aa, synthetic construct
  REGION 1..25: note = Description of Artificial Sequence: Synthetic peptide
CTQLNRALTGIAVEQDKNTQEVFAQ

SEQ ID NO: 14101 - protein, 25 aa, synthetic construct
  REGION 1..25: note = Description of Artificial Sequence: Synthetic peptide
TQLNRALTGIAVEQDKNTQEVFAQV

SEQ ID NO: 14102 - protein, 25 aa, synthetic construct
  REGION 1..25: note = Description of Artificial Sequence: Synthetic peptide
FLKKDAPYIVGDVVQEGVLTAVVIP

SEQ ID NO: 14103 - protein, 25 aa, synthetic construct
  REGION 1..25: note = Description of Artificial Sequence: Synthetic peptide
TPSGTWLTYTGAIKLDDKDPNFKDQ

SEQ ID NO: 14104 - protein, 25 aa, synthetic construct
  REGION 1..25: note = Description of Artificial Sequence: Synthetic peptide
YRAFDIYNDKVAGFAKFLKTNCCRF

SEQ ID NO: 14105 - protein, 25 aa, synthetic construct
  REGION 1..25: note = Description of Artificial Sequence: Synthetic peptide
RAFDIYNDKVAGFAKFLKTNCCRFQ

SEQ ID NO: 14106 - protein, 25 aa, synthetic construct
  REGION 1..25: note = Description of Artificial Sequence: Synthetic peptide
TTCFSVAALTNNVAFQTVKPGNFNK

SEQ ID NO: 14107 - protein, 25 aa, synthetic construct
  REGION 1..25: note = Description of Artificial Sequence: Synthetic peptide
CFSVAALTNNVAFQTVKPGNFNKDF

SEQ ID NO: 14108 - protein, 25 aa, synthetic construct
  REGION 1..25: note = Description of Artificial Sequence: Synthetic peptide
TCFSVAALTNNVAFQTVKPGNFNKD

SEQ ID NO: 14109 - protein, 25 aa, synthetic construct
  REGION 1..25: note = Description of Artificial Sequence: Synthetic peptide
LSYFIASFRLFARTRSMWSFNPETN

SEQ ID NO: 14110 - protein, 25 aa, synthetic construct
  REGION 1..25: note = Description of Artificial Sequence: Synthetic peptide
WLSYFIASFRLFARTRSMWSFNPET

SEQ ID NO: 14111 - protein, 25 aa, synthetic construct
  REGION 1..25: note = Description of Artificial Sequence: Synthetic peptide
SYFIASFRLFARTRSMWSFNPETNI

SEQ ID NO: 14112 - protein, 25 aa, synthetic construct
  REGION 1..25: note = Description of Artificial Sequence: Synthetic peptide
FIASFRLFARTRSMWSFNPETNILL

SEQ ID NO: 14113 - protein, 25 aa, synthetic construct
  REGION 1..25: note = Description of Artificial Sequence: Synthetic peptide
YFIASFRLFARTRSMWSFNPETNIL

SEQ ID NO: 14114 - protein, 25 aa, synthetic construct
  REGION 1..25: note = Description of Artificial Sequence: Synthetic peptide
ALDISASIVAGGIVAIVVTCLAYYF

SEQ ID NO: 14115 - protein, 25 aa, synthetic construct
  REGION 1..25: note = Description of Artificial Sequence: Synthetic peptide
LDISASIVAGGIVAIVVTCLAYYFM

SEQ ID NO: 14116 - protein, 25 aa, synthetic construct
  REGION 1..25: note = Description of Artificial Sequence: Synthetic peptide
FDTFNGECPNFVFPLNSIIKTIQPR

SEQ ID NO: 14117 - protein, 25 aa, synthetic construct
  REGION 1..25: note = Description of Artificial Sequence: Synthetic peptide
NVAKYTQLCQYLNTLTLAVPYNMRV

SEQ ID NO: 14118 - protein, 25 aa, synthetic construct
  REGION 1..25: note = Description of Artificial Sequence: Synthetic peptide
MNVAKYTQLCQYLNTLTLAVPYNMR

SEQ ID NO: 14119 - protein, 25 aa, synthetic construct
  REGION 1..25: note = Description of Artificial Sequence: Synthetic peptide
DADSKIVQLSEISMDNSPNLAWPLI

SEQ ID NO: 14120 - protein, 25 aa, synthetic construct
  REGION 1..25: note = Description of Artificial Sequence: Synthetic peptide
GDKSVYYTSNPTTFHLDGEVITFDN

SEQ ID NO: 14121 - protein, 25 aa, synthetic construct
  REGION 1..25: note = Description of Artificial Sequence: Synthetic peptide
RGDKSVYYTSNPTTFHLDGEVITFD

SEQ ID NO: 14122 - protein, 25 aa, synthetic construct
  REGION 1..25: note = Description of Artificial Sequence: Synthetic peptide
IASFRLFARTRSMWSFNPETNILLN

SEQ ID NO: 14123 - protein, 25 aa, synthetic construct
  REGION 1..25: note = Description of Artificial Sequence: Synthetic peptide
FDIYNDKVAGFAKFLKTNCCRFQEK

SEQ ID NO: 14124 - protein, 25 aa, synthetic construct
  REGION 1..25: note = Description of Artificial Sequence: Synthetic peptide
TTIKPVTYKLDGVVCTEIDPKLDNY

SEQ ID NO: 14125 - protein, 25 aa, synthetic construct
  REGION 1..25: note = Description of Artificial Sequence: Synthetic peptide
SVAALTNNVAFQTVKPGNFNKDFYD

SEQ ID NO: 14126 - protein, 25 aa, synthetic construct
  REGION 1..25: note = Description of Artificial Sequence: Synthetic peptide
KLSYGIATVREVLSDRELHLSWEVG

SEQ ID NO: 14127 - protein, 25 aa, synthetic construct
  REGION 1..25: note = Description of Artificial Sequence: Synthetic peptide
SGFKLKDCVMYASAVVLLILMTART

SEQ ID NO: 14128 - protein, 25 aa, synthetic construct
  REGION 1..25: note = Description of Artificial Sequence: Synthetic peptide
GFKLKDCVMYASAVVLLILMTARTV

SEQ ID NO: 14129 - protein, 25 aa, synthetic construct
  REGION 1..25: note = Description of Artificial Sequence: Synthetic peptide
SLSGFKLKDCVMYASAVVLLILMTA

SEQ ID NO: 14130 - protein, 25 aa, synthetic construct
  REGION 1..25: note = Description of Artificial Sequence: Synthetic peptide
LSGFKLKDCVMYASAVVLLILMTAR

SEQ ID NO: 14131 - protein, 25 aa, synthetic construct
  REGION 1..25: note = Description of Artificial Sequence: Synthetic peptide
DLLIRKSNHNFLVQAGNVQLRVIGH

SEQ ID NO: 14132 - protein, 25 aa, synthetic construct
  REGION 1..25: note = Description of Artificial Sequence: Synthetic peptide
LLIRKSNHNFLVQAGNVQLRVIGHS

SEQ ID NO: 14133 - protein, 25 aa, synthetic construct
  REGION 1..25: note = Description of Artificial Sequence: Synthetic peptide
LIRKSNHNFLVQAGNVQLRVIGHSM

SEQ ID NO: 14134 - protein, 25 aa, synthetic construct
  REGION 1..25: note = Description of Artificial Sequence: Synthetic peptide
TQQLIRAAEIRASANLAATKMSECV

SEQ ID NO: 14135 - protein, 25 aa, synthetic construct
  REGION 1..25: note = Description of Artificial Sequence: Synthetic peptide
QALPQRQKKQQTVTLLPAADLDDFS

SEQ ID NO: 14136 - protein, 25 aa, synthetic construct
  REGION 1..25: note = Description of Artificial Sequence: Synthetic peptide
FLNRFTTTLNDFNLVAMKYNYEPLT

SEQ ID NO: 14137 - protein, 25 aa, synthetic construct
  REGION 1..25: note = Description of Artificial Sequence: Synthetic peptide
WFLNRFTTTLNDFNLVAMKYNYEPL

SEQ ID NO: 14138 - protein, 25 aa, synthetic construct
  REGION 1..25: note = Description of Artificial Sequence: Synthetic peptide
DRWFLNRFTTTLNDFNLVAMKYNYE

SEQ ID NO: 14139 - protein, 25 aa, synthetic construct
  REGION 1..25: note = Description of Artificial Sequence: Synthetic peptide
NGDRWFLNRFTTTLNDFNLVAMKYN

SEQ ID NO: 14140 - protein, 25 aa, synthetic construct
  REGION 1..25: note = Description of Artificial Sequence: Synthetic peptide
GDRWFLNRFTTTLNDFNLVAMKYNY

SEQ ID NO: 14141 - protein, 25 aa, synthetic construct
  REGION 1..25: note = Description of Artificial Sequence: Synthetic peptide
VINGDRWFLNRFTTTLNDFNLVAMK

SEQ ID NO: 14142 - protein, 25 aa, synthetic construct
  REGION 1..25: note = Description of Artificial Sequence: Synthetic peptide
RWFLNRFTTTLNDFNLVAMKYNYEP

SEQ ID NO: 14143 - protein, 25 aa, synthetic construct
  REGION 1..25: note = Description of Artificial Sequence: Synthetic peptide
INGDRWFLNRFTTTLNDFNLVAMKY

SEQ ID NO: 14144 - protein, 25 aa, synthetic construct
  REGION 1..25: note = Description of Artificial Sequence: Synthetic peptide
LIRAAEIRASANLAATKMSECVLGQ

SEQ ID NO: 14145 - protein, 25 aa, synthetic construct
  REGION 1..25: note = Description of Artificial Sequence: Synthetic peptide
QLIRAAEIRASANLAATKMSECVLG

SEQ ID NO: 14146 - protein, 25 aa, synthetic construct
  REGION 1..25: note = Description of Artificial Sequence: Synthetic peptide
KCSRIIPARARVECFDKFKVNSTLE

SEQ ID NO: 14147 - protein, 25 aa, synthetic construct
  REGION 1..25: note = Description of Artificial Sequence: Synthetic peptide
CSRIIPARARVECFDKFKVNSTLEQ

SEQ ID NO: 14148 - protein, 25 aa, synthetic construct
  REGION 1..25: note = Description of Artificial Sequence: Synthetic peptide
TVLPPLLTDEMIAQYTSALLAGTIT

SEQ ID NO: 14149 - protein, 25 aa, synthetic construct
  REGION 1..25: note = Description of Artificial Sequence: Synthetic peptide
VLPPLLTDEMIAQYTSALLAGTITS

SEQ ID NO: 14150 - protein, 25 aa, synthetic construct
  REGION 1..25: note = Description of Artificial Sequence: Synthetic peptide
LKITEEVGHTDLMAAYVDNSSLTIK

SEQ ID NO: 14151 - protein, 25 aa, synthetic construct
  REGION 1..25: note = Description of Artificial Sequence: Synthetic peptide
NFRVQPTESIVRFPNITNLCPFGEV

SEQ ID NO: 14152 - protein, 25 aa, synthetic construct
  REGION 1..25: note = Description of Artificial Sequence: Synthetic peptide
FRVQPTESIVRFPNITNLCPFGEVF

SEQ ID NO: 14153 - protein, 25 aa, synthetic construct
  REGION 1..25: note = Description of Artificial Sequence: Synthetic peptide
KGYGCSCDQLREPMLQSADAQSFLN

SEQ ID NO: 14154 - protein, 25 aa, synthetic construct
  REGION 1..25: note = Description of Artificial Sequence: Synthetic peptide
RELMRELNGGAYTRYVDNNFCGPDG

SEQ ID NO: 14155 - protein, 25 aa, synthetic construct
  REGION 1..25: note = Description of Artificial Sequence: Synthetic peptide
MRELNGGAYTRYVDNNFCGPDGYPL

SEQ ID NO: 14156 - protein, 25 aa, synthetic construct
  REGION 1..25: note = Description of Artificial Sequence: Synthetic peptide
LMRELNGGAYTRYVDNNFCGPDGYP

SEQ ID NO: 14157 - protein, 25 aa, synthetic construct
  REGION 1..25: note = Description of Artificial Sequence: Synthetic peptide
ELMRELNGGAYTRYVDNNFCGPDGY

SEQ ID NO: 14158 - protein, 25 aa, synthetic construct
  REGION 1..25: note = Description of Artificial Sequence: Synthetic peptide
RELNGGAYTRYVDNNFCGPDGYPLE

SEQ ID NO: 14159 - protein, 25 aa, synthetic construct
  REGION 1..25: note = Description of Artificial Sequence: Synthetic peptide
LSPRWYFYYLGTGPEAGLPYGANKD

SEQ ID NO: 14160 - protein, 25 aa, synthetic construct
  REGION 1..25: note = Description of Artificial Sequence: Synthetic peptide
TSLSGFKLKDCVMYASAVVLLILMT

SEQ ID NO: 14161 - protein, 25 aa, synthetic construct
  REGION 1..25: note = Description of Artificial Sequence: Synthetic peptide
TNNTFTLKGGAPTKVTFGDDTVIEV

SEQ ID NO: 14162 - protein, 25 aa, synthetic construct
  REGION 1..25: note = Description of Artificial Sequence: Synthetic peptide
NTFTLKGGAPTKVTFGDDTVIEVQG

SEQ ID NO: 14163 - protein, 25 aa, synthetic construct
  REGION 1..25: note = Description of Artificial Sequence: Synthetic peptide
NNTFTLKGGAPTKVTFGDDTVIEVQ

SEQ ID NO: 14164 - protein, 25 aa, synthetic construct
  REGION 1..25: note = Description of Artificial Sequence: Synthetic peptide
VTNNTFTLKGGAPTKVTFGDDTVIE

SEQ ID NO: 14165 - protein, 25 aa, synthetic construct
  REGION 1..25: note = Description of Artificial Sequence: Synthetic peptide
TDLMAAYVDNSSLTIKKPNELSRVL

SEQ ID NO: 14166 - protein, 25 aa, synthetic construct
  REGION 1..25: note = Description of Artificial Sequence: Synthetic peptide
RQKKQQTVTLLPAADLDDFSKQLQQ

SEQ ID NO: 14167 - protein, 25 aa, synthetic construct
  REGION 1..25: note = Description of Artificial Sequence: Synthetic peptide
MPSYCTGYREGYLNSTNVTIATYCT

SEQ ID NO: 14168 - protein, 25 aa, synthetic construct
  REGION 1..25: note = Description of Artificial Sequence: Synthetic peptide
TTEMLAKALRKVPTDNYITTYPGQG

SEQ ID NO: 14169 - protein, 25 aa, synthetic construct
  REGION 1..25: note = Description of Artificial Sequence: Synthetic peptide
TEMLAKALRKVPTDNYITTYPGQGL

SEQ ID NO: 14170 - protein, 25 aa, synthetic construct
  REGION 1..25: note = Description of Artificial Sequence: Synthetic peptide
TETDLTKGPHEFCSQHTMLVKQGDD

SEQ ID NO: 14171 - protein, 25 aa, synthetic construct
  REGION 1..25: note = Description of Artificial Sequence: Synthetic peptide
YHKNNKSWMESEFRVYSSANNCTFE

SEQ ID NO: 14172 - protein, 25 aa, synthetic construct
  REGION 1..25: note = Description of Artificial Sequence: Synthetic peptide
ELTGHMLDMYSVMLTNDNTSRYWEP

SEQ ID NO: 14173 - protein, 25 aa, synthetic construct
  REGION 1..25: note = Description of Artificial Sequence: Synthetic peptide
MESEFRVYSSANNCTFEYVSQPFLM

SEQ ID NO: 14174 - protein, 25 aa, synthetic construct
  REGION 1..25: note = Description of Artificial Sequence: Synthetic peptide
KNNKSWMESEFRVYSSANNCTFEYV

SEQ ID NO: 14175 - protein, 25 aa, synthetic construct
  REGION 1..25: note = Description of Artificial Sequence: Synthetic peptide
NKSWMESEFRVYSSANNCTFEYVSQ

SEQ ID NO: 14176 - protein, 25 aa, synthetic construct
  REGION 1..25: note = Description of Artificial Sequence: Synthetic peptide
KSWMESEFRVYSSANNCTFEYVSQP

SEQ ID NO: 14177 - protein, 25 aa, synthetic construct
  REGION 1..25: note = Description of Artificial Sequence: Synthetic peptide
NNKSWMESEFRVYSSANNCTFEYVS

SEQ ID NO: 14178 - protein, 25 aa, synthetic construct
  REGION 1..25: note = Description of Artificial Sequence: Synthetic peptide
SWMESEFRVYSSANNCTFEYVSQPF

SEQ ID NO: 14179 - protein, 25 aa, synthetic construct
  REGION 1..25: note = Description of Artificial Sequence: Synthetic peptide
WMESEFRVYSSANNCTFEYVSQPFL

SEQ ID NO: 14180 - protein, 25 aa, synthetic construct
  REGION 1..25: note = Description of Artificial Sequence: Synthetic peptide
GLPWNVVRIKIVQMLSDTLKNLSDR

SEQ ID NO: 14181 - protein, 25 aa, synthetic construct
  REGION 1..25: note = Description of Artificial Sequence: Synthetic peptide
KGLPWNVVRIKIVQMLSDTLKNLSD

SEQ ID NO: 14182 - protein, 25 aa, synthetic construct
  REGION 1..25: note = Description of Artificial Sequence: Synthetic peptide
YKGLPWNVVRIKIVQMLSDTLKNLS

SEQ ID NO: 14183 - protein, 25 aa, synthetic construct
  REGION 1..25: note = Description of Artificial Sequence: Synthetic peptide
DDYIATNGPLKVGGSCVLSGHNLAK

SEQ ID NO: 14184 - protein, 25 aa, synthetic construct
  REGION 1..25: note = Description of Artificial Sequence: Synthetic peptide
VNARLRAKHYVYIGDPAQLPAPRTL

SEQ ID NO: 14185 - protein, 25 aa, synthetic construct
  REGION 1..25: note = Description of Artificial Sequence: Synthetic peptide
VVNARLRAKHYVYIGDPAQLPAPRT

SEQ ID NO: 14186 - protein, 25 aa, synthetic construct
  REGION 1..25: note = Description of Artificial Sequence: Synthetic peptide
LFTRFFYVLGLAAIMQLFFSYFAVH

SEQ ID NO: 14187 - protein, 25 aa, synthetic construct
  REGION 1..25: note = Description of Artificial Sequence: Synthetic peptide
FTRFFYVLGLAAIMQLFFSYFAVHF

SEQ ID NO: 14188 - protein, 25 aa, synthetic construct
  REGION 1..25: note = Description of Artificial Sequence: Synthetic peptide
ASYQTQTNSPRRARSVASQSIIAYT

SEQ ID NO: 14189 - protein, 25 aa, synthetic construct
  REGION 1..25: note = Description of Artificial Sequence: Synthetic peptide
TVGQQDGSEDNQTTTIQTIVEVQPQ

SEQ ID NO: 14190 - protein, 25 aa, synthetic construct
  REGION 1..25: note = Description of Artificial Sequence: Synthetic peptide
VGQQDGSEDNQTTTIQTIVEVQPQL

SEQ ID NO: 14191 - protein, 25 aa, synthetic construct
  REGION 1..25: note = Description of Artificial Sequence: Synthetic peptide
SEDNQTTTIQTIVEVQPQLEMELTP

SEQ ID NO: 14192 - protein, 25 aa, synthetic construct
  REGION 1..25: note = Description of Artificial Sequence: Synthetic peptide
DGSEDNQTTTIQTIVEVQPQLEMEL

SEQ ID NO: 14193 - protein, 25 aa, synthetic construct
  REGION 1..25: note = Description of Artificial Sequence: Synthetic peptide
QQDGSEDNQTTTIQTIVEVQPQLEM

SEQ ID NO: 14194 - protein, 25 aa, synthetic construct
  REGION 1..25: note = Description of Artificial Sequence: Synthetic peptide
QDGSEDNQTTTIQTIVEVQPQLEME

SEQ ID NO: 14195 - protein, 25 aa, synthetic construct
  REGION 1..25: note = Description of Artificial Sequence: Synthetic peptide
GSEDNQTTTIQTIVEVQPQLEMELT

SEQ ID NO: 14196 - protein, 25 aa, synthetic construct
  REGION 1..25: note = Description of Artificial Sequence: Synthetic peptide
GQQDGSEDNQTTTIQTIVEVQPQLE

SEQ ID NO: 14197 - protein, 25 aa, synthetic construct
  REGION 1..25: note = Description of Artificial Sequence: Synthetic peptide
VSTSGRWVLNNDYYRSLPGVFCGVD

SEQ ID NO: 14198 - protein, 25 aa, synthetic construct
  REGION 1..25: note = Description of Artificial Sequence: Synthetic peptide
NLQHRLYECLYRNRDVDTDFVNEFY

SEQ ID NO: 14199 - protein, 25 aa, synthetic construct
  REGION 1..25: note = Description of Artificial Sequence: Synthetic peptide
KATNNAMQVESDDYIATNGPLKVGG

SEQ ID NO: 14200 - protein, 25 aa, synthetic construct
  REGION 1..25: note = Description of Artificial Sequence: Synthetic peptide
CNVDRYPANSIVCRFDTRVLSNLNL

SEQ ID NO: 14201 - protein, 25 aa, synthetic construct
  REGION 1..25: note = Description of Artificial Sequence: Synthetic peptide
NCNVDRYPANSIVCRFDTRVLSNLN

SEQ ID NO: 14202 - protein, 25 aa, synthetic construct
  REGION 1..25: note = Description of Artificial Sequence: Synthetic peptide
NVDRYPANSIVCRFDTRVLSNLNLP

SEQ ID NO: 14203 - protein, 25 aa, synthetic construct
  REGION 1..25: note = Description of Artificial Sequence: Synthetic peptide
ATLPKGIMMNVAKYTQLCQYLNTLT

SEQ ID NO: 14204 - protein, 25 aa, synthetic construct
  REGION 1..25: note = Description of Artificial Sequence: Synthetic peptide
LGLAAIMQLFFSYFAVHFISNSWLM

SEQ ID NO: 14205 - protein, 25 aa, synthetic construct
  REGION 1..25: note = Description of Artificial Sequence: Synthetic peptide
GISQYSLRLIDAMMFTSDLATNNLV

SEQ ID NO: 14206 - protein, 25 aa, synthetic construct
  REGION 1..25: note = Description of Artificial Sequence: Synthetic peptide
ISQYSLRLIDAMMFTSDLATNNLVV

SEQ ID NO: 14207 - protein, 25 aa, synthetic construct
  REGION 1..25: note = Description of Artificial Sequence: Synthetic peptide
SQYSLRLIDAMMFTSDLATNNLVVM

SEQ ID NO: 14208 - protein, 25 aa, synthetic construct
  REGION 1..25: note = Description of Artificial Sequence: Synthetic peptide
SNNLDSKVGGNYNYLYRLFRKSNLK

SEQ ID NO: 14209 - protein, 25 aa, synthetic construct
  REGION 1..25: note = Description of Artificial Sequence: Synthetic peptide
NSNNLDSKVGGNYNYLYRLFRKSNL

SEQ ID NO: 14210 - protein, 25 aa, synthetic construct
  REGION 1..25: note = Description of Artificial Sequence: Synthetic peptide
WNSNNLDSKVGGNYNYLYRLFRKSN

SEQ ID NO: 14211 - protein, 25 aa, synthetic construct
  REGION 1..25: note = Description of Artificial Sequence: Synthetic peptide
NNLDSKVGGNYNYLYRLFRKSNLKP

SEQ ID NO: 14212 - protein, 25 aa, synthetic construct
  REGION 1..25: note = Description of Artificial Sequence: Synthetic peptide
CPLIAAVITREVGFVVPGLPGTILR

SEQ ID NO: 14213 - protein, 25 aa, synthetic construct
  REGION 1..25: note = Description of Artificial Sequence: Synthetic peptide
DLFLPFFSNVTWFHAIHVSGTNGTK

SEQ ID NO: 14214 - protein, 25 aa, synthetic construct
  REGION 1..25: note = Description of Artificial Sequence: Synthetic peptide
QDLFLPFFSNVTWFHAIHVSGTNGT

SEQ ID NO: 14215 - protein, 25 aa, synthetic construct
  REGION 1..25: note = Description of Artificial Sequence: Synthetic peptide
TQDLFLPFFSNVTWFHAIHVSGTNG

SEQ ID NO: 14216 - protein, 25 aa, synthetic construct
  REGION 1..25: note = Description of Artificial Sequence: Synthetic peptide
YDKLQFTSLEIPRRNVATLQAENVT

SEQ ID NO: 14217 - protein, 25 aa, synthetic construct
  REGION 1..25: note = Description of Artificial Sequence: Synthetic peptide
DLYDKLQFTSLEIPRRNVATLQAEN

SEQ ID NO: 14218 - protein, 25 aa, synthetic construct
  REGION 1..25: note = Description of Artificial Sequence: Synthetic peptide
LYDKLQFTSLEIPRRNVATLQAENV

SEQ ID NO: 14219 - protein, 25 aa, synthetic construct
  REGION 1..25: note = Description of Artificial Sequence: Synthetic peptide
LSTDGNKIADKYVRNLQHRLYECLY

SEQ ID NO: 14220 - protein, 25 aa, synthetic construct
  REGION 1..25: note = Description of Artificial Sequence: Synthetic peptide
ALLSTDGNKIADKYVRNLQHRLYEC

SEQ ID NO: 14221 - protein, 25 aa, synthetic construct
  REGION 1..25: note = Description of Artificial Sequence: Synthetic peptide
LLSTDGNKIADKYVRNLQHRLYECL

SEQ ID NO: 14222 - protein, 25 aa, synthetic construct
  REGION 1..25: note = Description of Artificial Sequence: Synthetic peptide
STDGNKIADKYVRNLQHRLYECLYR

SEQ ID NO: 14223 - protein, 25 aa, synthetic construct
  REGION 1..25: note = Description of Artificial Sequence: Synthetic peptide
DEISMATNYDLSVVNARLRAKHYVY

SEQ ID NO: 14224 - protein, 25 aa, synthetic construct
  REGION 1..25: note = Description of Artificial Sequence: Synthetic peptide
FDEISMATNYDLSVVNARLRAKHYV

SEQ ID NO: 14225 - protein, 25 aa, synthetic construct
  REGION 1..25: note = Description of Artificial Sequence: Synthetic peptide
MYSFVSEETGTLIVNSVLLFLAFVV

SEQ ID NO: 14226 - protein, 25 aa, synthetic construct
  REGION 1..25: note = Description of Artificial Sequence: Synthetic peptide
GVSICSTMTNRQFHQKLLKSIAATR

SEQ ID NO: 14227 - protein, 25 aa, synthetic construct
  REGION 1..25: note = Description of Artificial Sequence: Synthetic peptide
VSICSTMTNRQFHQKLLKSIAATRG

SEQ ID NO: 14228 - protein, 25 aa, synthetic construct
  REGION 1..25: note = Description of Artificial Sequence: Synthetic peptide
VSFCYMHHMELPTGVHAGTDLEGNF

SEQ ID NO: 14229 - protein, 25 aa, synthetic construct
  REGION 1..25: note = Description of Artificial Sequence: Synthetic peptide
DGYPLECIKDLLARAGKASCTLSEQ

SEQ ID NO: 14230 - protein, 25 aa, synthetic construct
  REGION 1..25: note = Description of Artificial Sequence: Synthetic peptide
WDYPKCDRAMPNMLRIMASLVLARK

SEQ ID NO: 14231 - protein, 25 aa, synthetic construct
  REGION 1..25: note = Description of Artificial Sequence: Synthetic peptide
MFDAYVNTFSSTFNVPMEKLKTLVA

SEQ ID NO: 14232 - protein, 25 aa, synthetic construct
  REGION 1..25: note = Description of Artificial Sequence: Synthetic peptide
FDAYVNTFSSTFNVPMEKLKTLVAT

SEQ ID NO: 14233 - protein, 25 aa, synthetic construct
  REGION 1..25: note = Description of Artificial Sequence: Synthetic peptide
VKMFDAYVNTFSSTFNVPMEKLKTL

SEQ ID NO: 14234 - protein, 25 aa, synthetic construct
  REGION 1..25: note = Description of Artificial Sequence: Synthetic peptide
KMFDAYVNTFSSTFNVPMEKLKTLV

SEQ ID NO: 14235 - protein, 25 aa, synthetic construct
  REGION 1..25: note = Description of Artificial Sequence: Synthetic peptide
DAYVNTFSSTFNVPMEKLKTLVATA

SEQ ID NO: 14236 - protein, 25 aa, synthetic construct
  REGION 1..25: note = Description of Artificial Sequence: Synthetic peptide
LPTGVHAGTDLEGNFYGPFVDRQTA

SEQ ID NO: 14237 - protein, 25 aa, synthetic construct
  REGION 1..25: note = Description of Artificial Sequence: Synthetic peptide
MELPTGVHAGTDLEGNFYGPFVDRQ

SEQ ID NO: 14238 - protein, 25 aa, synthetic construct
  REGION 1..25: note = Description of Artificial Sequence: Synthetic peptide
HMELPTGVHAGTDLEGNFYGPFVDR

SEQ ID NO: 14239 - protein, 25 aa, synthetic construct
  REGION 1..25: note = Description of Artificial Sequence: Synthetic peptide
ELPTGVHAGTDLEGNFYGPFVDRQT

SEQ ID NO: 14240 - protein, 25 aa, synthetic construct
  REGION 1..25: note = Description of Artificial Sequence: Synthetic peptide
IGAGICASYQTQTNSPRRARSVASQ

SEQ ID NO: 14241 - protein, 25 aa, synthetic construct
  REGION 1..25: note = Description of Artificial Sequence: Synthetic peptide
PIGAGICASYQTQTNSPRRARSVAS

SEQ ID NO: 14242 - protein, 25 aa, synthetic construct
  REGION 1..25: note = Description of Artificial Sequence: Synthetic peptide
CTNYMPYFFTLLLQLCTFTRSTNSR

SEQ ID NO: 14243 - protein, 25 aa, synthetic construct
  REGION 1..25: note = Description of Artificial Sequence: Synthetic peptide
TNYMPYFFTLLLQLCTFTRSTNSRI

SEQ ID NO: 14244 - protein, 25 aa, synthetic construct
  REGION 1..25: note = Description of Artificial Sequence: Synthetic peptide
SMATNYDLSVVNARLRAKHYVYIGD

SEQ ID NO: 14245 - protein, 25 aa, synthetic construct
  REGION 1..25: note = Description of Artificial Sequence: Synthetic peptide
MATNYDLSVVNARLRAKHYVYIGDP

SEQ ID NO: 14246 - protein, 25 aa, synthetic construct
  REGION 1..25: note = Description of Artificial Sequence: Synthetic peptide
NARDGCVPLNIIPLTTAAKLMVVIP

SEQ ID NO: 14247 - protein, 25 aa, synthetic construct
  REGION 1..25: note = Description of Artificial Sequence: Synthetic peptide
NNARDGCVPLNIIPLTTAAKLMVVI

SEQ ID NO: 14248 - protein, 25 aa, synthetic construct
  REGION 1..25: note = Description of Artificial Sequence: Synthetic peptide
GPLKVGGSCVLSGHNLAKHCLHVVG

SEQ ID NO: 14249 - protein, 25 aa, synthetic construct
  REGION 1..25: note = Description of Artificial Sequence: Synthetic peptide
VAIVVTCLAYYFMRFRRAFGEYSHV

SEQ ID NO: 14250 - protein, 25 aa, synthetic construct
  REGION 1..25: note = Description of Artificial Sequence: Synthetic peptide
GTGTIYTELEPPCRFVTDTPKGPKV

SEQ ID NO: 14251 - protein, 25 aa, synthetic construct
  REGION 1..25: note = Description of Artificial Sequence: Synthetic peptide
DGTGTIYTELEPPCRFVTDTPKGPK

SEQ ID NO: 14252 - protein, 25 aa, synthetic construct
  REGION 1..25: note = Description of Artificial Sequence: Synthetic peptide
TGTIYTELEPPCRFVTDTPKGPKVK

SEQ ID NO: 14253 - protein, 25 aa, synthetic construct
  REGION 1..25: note = Description of Artificial Sequence: Synthetic peptide
EFLKRGDKSVYYTSNPTTFHLDGEV

SEQ ID NO: 14254 - protein, 25 aa, synthetic construct
  REGION 1..25: note = Description of Artificial Sequence: Synthetic peptide
FLKRGDKSVYYTSNPTTFHLDGEVI

SEQ ID NO: 14255 - protein, 25 aa, synthetic construct
  REGION 1..25: note = Description of Artificial Sequence: Synthetic peptide
ETKFLTENLLLYIDINGNLHPDSAT

SEQ ID NO: 14256 - protein, 25 aa, synthetic construct
  REGION 1..25: note = Description of Artificial Sequence: Synthetic peptide
EETKFLTENLLLYIDINGNLHPDSA

SEQ ID NO: 14257 - protein, 25 aa, synthetic construct
  REGION 1..25: note = Description of Artificial Sequence: Synthetic peptide
EWSMATYYLFDESGEFKLASHMYCS

SEQ ID NO: 14258 - protein, 25 aa, synthetic construct
  REGION 1..25: note = Description of Artificial Sequence: Synthetic peptide
MATYYLFDESGEFKLASHMYCSFYP

SEQ ID NO: 14259 - protein, 25 aa, synthetic construct
  REGION 1..25: note = Description of Artificial Sequence: Synthetic peptide
WSMATYYLFDESGEFKLASHMYCSF

SEQ ID NO: 14260 - protein, 25 aa, synthetic construct
  REGION 1..25: note = Description of Artificial Sequence: Synthetic peptide
SMATYYLFDESGEFKLASHMYCSFY

SEQ ID NO: 14261 - protein, 25 aa, synthetic construct
  REGION 1..25: note = Description of Artificial Sequence: Synthetic peptide
LKKRWQLALSKGVHFVCNLLLLFVT

SEQ ID NO: 14262 - protein, 25 aa, synthetic construct
  REGION 1..25: note = Description of Artificial Sequence: Synthetic peptide
EQYVFCTVNALPETTADIVVFDEIS

SEQ ID NO: 14263 - protein, 25 aa, synthetic construct
  REGION 1..25: note = Description of Artificial Sequence: Synthetic peptide
LEQYVFCTVNALPETTADIVVFDEI

SEQ ID NO: 14264 - protein, 25 aa, synthetic construct
  REGION 1..25: note = Description of Artificial Sequence: Synthetic peptide
ARIVYTACSHAAVDALCEKALKYLP

SEQ ID NO: 14265 - protein, 25 aa, synthetic construct
  REGION 1..25: note = Description of Artificial Sequence: Synthetic peptide
TFTRSTNSRIKASMPTTIAKNTVKS

SEQ ID NO: 14266 - protein, 25 aa, synthetic construct
  REGION 1..25: note = Description of Artificial Sequence: Synthetic peptide
FTRSTNSRIKASMPTTIAKNTVKSV

SEQ ID NO: 14267 - protein, 25 aa, synthetic construct
  REGION 1..25: note = Description of Artificial Sequence: Synthetic peptide
IGIVNNTVYDPLQPELDSFKEELDK

SEQ ID NO: 14268 - protein, 25 aa, synthetic construct
  REGION 1..25: note = Description of Artificial Sequence: Synthetic peptide
VNNTVYDPLQPELDSFKEELDKYFK

SEQ ID NO: 14269 - protein, 25 aa, synthetic construct
  REGION 1..25: note = Description of Artificial Sequence: Synthetic peptide
IVNNTVYDPLQPELDSFKEELDKYF

SEQ ID NO: 14270 - protein, 25 aa, synthetic construct
  REGION 1..25: note = Description of Artificial Sequence: Synthetic peptide
GIVNNTVYDPLQPELDSFKEELDKY

SEQ ID NO: 14271 - protein, 25 aa, synthetic construct
  REGION 1..25: note = Description of Artificial Sequence: Synthetic peptide
GYPNMFITREEAIRHVRAWIGFDVE

SEQ ID NO: 14272 - protein, 25 aa, synthetic construct
  REGION 1..25: note = Description of Artificial Sequence: Synthetic peptide
CLWSTKPVETSNSFDVLKSEDAQGM

SEQ ID NO: 14273 - protein, 25 aa, synthetic construct
  REGION 1..25: note = Description of Artificial Sequence: Synthetic peptide
QAMTQMYKQARSEDKRAKVTSAMQT

SEQ ID NO: 14274 - protein, 25 aa, synthetic construct
  REGION 1..25: note = Description of Artificial Sequence: Synthetic peptide
AMTQMYKQARSEDKRAKVTSAMQTM

SEQ ID NO: 14275 - protein, 25 aa, synthetic construct
  REGION 1..25: note = Description of Artificial Sequence: Synthetic peptide
DQAMTQMYKQARSEDKRAKVTSAMQ

SEQ ID NO: 14276 - protein, 25 aa, synthetic construct
  REGION 1..25: note = Description of Artificial Sequence: Synthetic peptide
RHVICTSEDMLNPNYEDLLIRKSNH

SEQ ID NO: 14277 - protein, 25 aa, synthetic construct
  REGION 1..25: note = Description of Artificial Sequence: Synthetic peptide
HVICTSEDMLNPNYEDLLIRKSNHN

SEQ ID NO: 14278 - protein, 25 aa, synthetic construct
  REGION 1..25: note = Description of Artificial Sequence: Synthetic peptide
RQVVNVVTTKIALKGGKIVNNWLKQ

SEQ ID NO: 14279 - protein, 25 aa, synthetic construct
  REGION 1..25: note = Description of Artificial Sequence: Synthetic peptide
NVVTTKIALKGGKIVNNWLKQLIKV

SEQ ID NO: 14280 - protein, 25 aa, synthetic construct
  REGION 1..25: note = Description of Artificial Sequence: Synthetic peptide
VNVVTTKIALKGGKIVNNWLKQLIK

SEQ ID NO: 14281 - protein, 25 aa, synthetic construct
  REGION 1..25: note = Description of Artificial Sequence: Synthetic peptide
TDPYEDFQENWNTKHSSGVTRELMR

SEQ ID NO: 14282 - protein, 25 aa, synthetic construct
  REGION 1..25: note = Description of Artificial Sequence: Synthetic peptide
ERSEAGVCVSTSGRWVLNNDYYRSL

SEQ ID NO: 14283 - protein, 25 aa, synthetic construct
  REGION 1..25: note = Description of Artificial Sequence: Synthetic peptide
RSEAGVCVSTSGRWVLNNDYYRSLP

SEQ ID NO: 14284 - protein, 25 aa, synthetic construct
  REGION 1..25: note = Description of Artificial Sequence: Synthetic peptide
CERSEAGVCVSTSGRWVLNNDYYRS

SEQ ID NO: 14285 - protein, 25 aa, synthetic construct
  REGION 1..25: note = Description of Artificial Sequence: Synthetic peptide
SEAGVCVSTSGRWVLNNDYYRSLPG

SEQ ID NO: 14286 - protein, 25 aa, synthetic construct
  REGION 1..25: note = Description of Artificial Sequence: Synthetic peptide
TCERSEAGVCVSTSGRWVLNNDYYR

SEQ ID NO: 14287 - protein, 25 aa, synthetic construct
  REGION 1..25: note = Description of Artificial Sequence: Synthetic peptide
LTYNKVENMTPRDLGACIDCSARHI

SEQ ID NO: 14288 - protein, 25 aa, synthetic construct
  REGION 1..25: note = Description of Artificial Sequence: Synthetic peptide
MLTYNKVENMTPRDLGACIDCSARH

SEQ ID NO: 14289 - protein, 25 aa, synthetic construct
  REGION 1..25: note = Description of Artificial Sequence: Synthetic peptide
PLKLRGTAVMSLKEGQINDMILSLL

SEQ ID NO: 14290 - protein, 25 aa, synthetic construct
  REGION 1..25: note = Description of Artificial Sequence: Synthetic peptide
YPNASFDNFKFVCDNIKFADDLNQL

SEQ ID NO: 14291 - protein, 25 aa, synthetic construct
  REGION 1..25: note = Description of Artificial Sequence: Synthetic peptide
DLGDELGTDPYEDFQENWNTKHSSG

SEQ ID NO: 14292 - protein, 25 aa, synthetic construct
  REGION 1..25: note = Description of Artificial Sequence: Synthetic peptide
GDELGTDPYEDFQENWNTKHSSGVT

SEQ ID NO: 14293 - protein, 25 aa, synthetic construct
  REGION 1..25: note = Description of Artificial Sequence: Synthetic peptide
FDLGDELGTDPYEDFQENWNTKHSS

SEQ ID NO: 14294 - protein, 25 aa, synthetic construct
  REGION 1..25: note = Description of Artificial Sequence: Synthetic peptide
SFDLGDELGTDPYEDFQENWNTKHS

SEQ ID NO: 14295 - protein, 25 aa, synthetic construct
  REGION 1..25: note = Description of Artificial Sequence: Synthetic peptide
LGDELGTDPYEDFQENWNTKHSSGV

SEQ ID NO: 14296 - protein, 25 aa, synthetic construct
  REGION 1..25: note = Description of Artificial Sequence: Synthetic peptide
SVTSNYSGVVTTVMFLARGIVFMCV

SEQ ID NO: 14297 - protein, 25 aa, synthetic construct
  REGION 1..25: note = Description of Artificial Sequence: Synthetic peptide
ENMTPRDLGACIDCSARHINAQVAK

SEQ ID NO: 14298 - protein, 25 aa, synthetic construct
  REGION 1..25: note = Description of Artificial Sequence: Synthetic peptide
NKVENMTPRDLGACIDCSARHINAQ

SEQ ID NO: 14299 - protein, 25 aa, synthetic construct
  REGION 1..25: note = Description of Artificial Sequence: Synthetic peptide
NMTPRDLGACIDCSARHINAQVAKS

SEQ ID NO: 14300 - protein, 25 aa, synthetic construct
  REGION 1..25: note = Description of Artificial Sequence: Synthetic peptide
KVENMTPRDLGACIDCSARHINAQV

SEQ ID NO: 14301 - protein, 25 aa, synthetic construct
  REGION 1..25: note = Description of Artificial Sequence: Synthetic peptide
TPRDLGACIDCSARHINAQVAKSHN

SEQ ID NO: 14302 - protein, 25 aa, synthetic construct
  REGION 1..25: note = Description of Artificial Sequence: Synthetic peptide
TYNKVENMTPRDLGACIDCSARHIN

SEQ ID NO: 14303 - protein, 25 aa, synthetic construct
  REGION 1..25: note = Description of Artificial Sequence: Synthetic peptide
YNKVENMTPRDLGACIDCSARHINA

SEQ ID NO: 14304 - protein, 25 aa, synthetic construct
  REGION 1..25: note = Description of Artificial Sequence: Synthetic peptide
VENMTPRDLGACIDCSARHINAQVA

SEQ ID NO: 14305 - protein, 25 aa, synthetic construct
  REGION 1..25: note = Description of Artificial Sequence: Synthetic peptide
MTPRDLGACIDCSARHINAQVAKSH

SEQ ID NO: 14306 - protein, 25 aa, synthetic construct
  REGION 1..25: note = Description of Artificial Sequence: Synthetic peptide
QRNFYEPQIITTDNTFVSGNCDVVI

SEQ ID NO: 14307 - protein, 25 aa, synthetic construct
  REGION 1..25: note = Description of Artificial Sequence: Synthetic peptide
TQRNFYEPQIITTDNTFVSGNCDVV

SEQ ID NO: 14308 - protein, 25 aa, synthetic construct
  REGION 1..25: note = Description of Artificial Sequence: Synthetic peptide
DTFNGECPNFVFPLNSIIKTIQPRV

SEQ ID NO: 14309 - protein, 25 aa, synthetic construct
  REGION 1..25: note = Description of Artificial Sequence: Synthetic peptide
TFNGECPNFVFPLNSIIKTIQPRVE

SEQ ID NO: 14310 - protein, 25 aa, synthetic construct
  REGION 1..25: note = Description of Artificial Sequence: Synthetic peptide
LEILQKEKVNINIVGDFKLNEEIAI

SEQ ID NO: 14311 - protein, 25 aa, synthetic construct
  REGION 1..25: note = Description of Artificial Sequence: Synthetic peptide
EILQKEKVNINIVGDFKLNEEIAII

SEQ ID NO: 14312 - protein, 25 aa, synthetic construct
  REGION 1..25: note = Description of Artificial Sequence: Synthetic peptide
LLEILQKEKVNINIVGDFKLNEEIA

SEQ ID NO: 14313 - protein, 25 aa, synthetic construct
  REGION 1..25: note = Description of Artificial Sequence: Synthetic peptide
YTPSFKKGAKLLHKPIVWHVNNATN

SEQ ID NO: 14314 - protein, 25 aa, synthetic construct
  REGION 1..25: note = Description of Artificial Sequence: Synthetic peptide
SDDAVVCFNSTYASQGLVASIKNFK

SEQ ID NO: 14315 - protein, 25 aa, synthetic construct
  REGION 1..25: note = Description of Artificial Sequence: Synthetic peptide
LSDDAVVCFNSTYASQGLVASIKNF

SEQ ID NO: 14316 - protein, 25 aa, synthetic construct
  REGION 1..25: note = Description of Artificial Sequence: Synthetic peptide
LLSVLLSMQGAVDINKLCEEMLDNR

SEQ ID NO: 14317 - protein, 25 aa, synthetic construct
  REGION 1..25: note = Description of Artificial Sequence: Synthetic peptide
SLLSVLLSMQGAVDINKLCEEMLDN

SEQ ID NO: 14318 - protein, 25 aa, synthetic construct
  REGION 1..25: note = Description of Artificial Sequence: Synthetic peptide
KLIEYTDFATSACVLAAECTIFKDA

SEQ ID NO: 14319 - protein, 25 aa, synthetic construct
  REGION 1..25: note = Description of Artificial Sequence: Synthetic peptide
IEYTDFATSACVLAAECTIFKDASG

SEQ ID NO: 14320 - protein, 25 aa, synthetic construct
  REGION 1..25: note = Description of Artificial Sequence: Synthetic peptide
LIEYTDFATSACVLAAECTIFKDAS

SEQ ID NO: 14321 - protein, 25 aa, synthetic construct
  REGION 1..25: note = Description of Artificial Sequence: Synthetic peptide
SKLIEYTDFATSACVLAAECTIFKD

SEQ ID NO: 14322 - protein, 25 aa, synthetic construct
  REGION 1..25: note = Description of Artificial Sequence: Synthetic peptide
SRVSAKPPPGDQFKHLIPLMYKGLP

SEQ ID NO: 14323 - protein, 25 aa, synthetic construct
  REGION 1..25: note = Description of Artificial Sequence: Synthetic peptide
GGSCVLSGHNLAKHCLHVVGPNVNK

SEQ ID NO: 14324 - protein, 25 aa, synthetic construct
  REGION 1..25: note = Description of Artificial Sequence: Synthetic peptide
VGGSCVLSGHNLAKHCLHVVGPNVN

SEQ ID NO: 14325 - protein, 25 aa, synthetic construct
  REGION 1..25: note = Description of Artificial Sequence: Synthetic peptide
EVGPEHSLAEYHNESGLKTILRKGG

SEQ ID NO: 14326 - protein, 25 aa, synthetic construct
  REGION 1..25: note = Description of Artificial Sequence: Synthetic peptide
VGPEHSLAEYHNESGLKTILRKGGR

SEQ ID NO: 14327 - protein, 25 aa, synthetic construct
  REGION 1..25: note = Description of Artificial Sequence: Synthetic peptide
LHNWNCVNCDTFCAGSTFISDEVAR

SEQ ID NO: 14328 - protein, 25 aa, synthetic construct
  REGION 1..25: note = Description of Artificial Sequence: Synthetic peptide
NSYTTTIKPVTYKLDGVVCTEIDPK

SEQ ID NO: 14329 - protein, 25 aa, synthetic construct
  REGION 1..25: note = Description of Artificial Sequence: Synthetic peptide
KSAPLIELCVDEAGSKSPIQYIDIG

SEQ ID NO: 14330 - protein, 25 aa, synthetic construct
  REGION 1..25: note = Description of Artificial Sequence: Synthetic peptide
SAPLIELCVDEAGSKSPIQYIDIGN

SEQ ID NO: 14331 - protein, 25 aa, synthetic construct
  REGION 1..25: note = Description of Artificial Sequence: Synthetic peptide
GARKSAPLIELCVDEAGSKSPIQYI

SEQ ID NO: 14332 - protein, 25 aa, synthetic construct
  REGION 1..25: note = Description of Artificial Sequence: Synthetic peptide
RKSAPLIELCVDEAGSKSPIQYIDI

SEQ ID NO: 14333 - protein, 25 aa, synthetic construct
  REGION 1..25: note = Description of Artificial Sequence: Synthetic peptide
ARKSAPLIELCVDEAGSKSPIQYID

SEQ ID NO: 14334 - protein, 25 aa, synthetic construct
  REGION 1..25: note = Description of Artificial Sequence: Synthetic peptide
VSFSTFEEAALCTFLLNKEMYLKLR

SEQ ID NO: 14335 - protein, 25 aa, synthetic construct
  REGION 1..25: note = Description of Artificial Sequence: Synthetic peptide
GAISSVLNDILSRLDKVEAEVQIDR

SEQ ID NO: 14336 - protein, 25 aa, synthetic construct
  REGION 1..25: note = Description of Artificial Sequence: Synthetic peptide
VNINIVGDFKLNEEIAIILASFSAS

SEQ ID NO: 14337 - protein, 25 aa, synthetic construct
  REGION 1..25: note = Description of Artificial Sequence: Synthetic peptide
QQTVTLLPAADLDDFSKQLQQSMSS

SEQ ID NO: 14338 - protein, 25 aa, synthetic construct
  REGION 1..25: note = Description of Artificial Sequence: Synthetic peptide
KQQTVTLLPAADLDDFSKQLQQSMS

SEQ ID NO: 14339 - protein, 25 aa, synthetic construct
  REGION 1..25: note = Description of Artificial Sequence: Synthetic peptide
LMWLSYFIASFRLFARTRSMWSFNP

SEQ ID NO: 14340 - protein, 25 aa, synthetic construct
  REGION 1..25: note = Description of Artificial Sequence: Synthetic peptide
LPNNTASWFTALTQHGKEDLKFPRG

SEQ ID NO: 14341 - protein, 25 aa, synthetic construct
  REGION 1..25: note = Description of Artificial Sequence: Synthetic peptide
GLPNNTASWFTALTQHGKEDLKFPR

SEQ ID NO: 14342 - protein, 25 aa, synthetic construct
  REGION 1..25: note = Description of Artificial Sequence: Synthetic peptide
QGLPNNTASWFTALTQHGKEDLKFP

SEQ ID NO: 14343 - protein, 25 aa, synthetic construct
  REGION 1..25: note = Description of Artificial Sequence: Synthetic peptide
LVRDLPQGFSALEPLVDLPIGINIT

SEQ ID NO: 14344 - protein, 25 aa, synthetic construct
  REGION 1..25: note = Description of Artificial Sequence: Synthetic peptide
RDLPQGFSALEPLVDLPIGINITRF

SEQ ID NO: 14345 - protein, 25 aa, synthetic construct
  REGION 1..25: note = Description of Artificial Sequence: Synthetic peptide
NLVRDLPQGFSALEPLVDLPIGINI

SEQ ID NO: 14346 - protein, 25 aa, synthetic construct
  REGION 1..25: note = Description of Artificial Sequence: Synthetic peptide
VRDLPQGFSALEPLVDLPIGINITR

SEQ ID NO: 14347 - protein, 25 aa, synthetic construct
  REGION 1..25: note = Description of Artificial Sequence: Synthetic peptide
LALYNKYKYFSGAMDTTSYREAACC

SEQ ID NO: 14348 - protein, 25 aa, synthetic construct
  REGION 1..25: note = Description of Artificial Sequence: Synthetic peptide
KYKFVRIQPGQTFSVLACYNGSPSG

SEQ ID NO: 14349 - protein, 25 aa, synthetic construct
  REGION 1..25: note = Description of Artificial Sequence: Synthetic peptide
RIQPGQTFSVLACYNGSPSGVYQCA

SEQ ID NO: 14350 - protein, 25 aa, synthetic construct
  REGION 1..25: note = Description of Artificial Sequence: Synthetic peptide
VRIQPGQTFSVLACYNGSPSGVYQC

SEQ ID NO: 14351 - protein, 25 aa, synthetic construct
  REGION 1..25: note = Description of Artificial Sequence: Synthetic peptide
FVRIQPGQTFSVLACYNGSPSGVYQ

SEQ ID NO: 14352 - protein, 25 aa, synthetic construct
  REGION 1..25: note = Description of Artificial Sequence: Synthetic peptide
QPGQTFSVLACYNGSPSGVYQCAMR

SEQ ID NO: 14353 - protein, 25 aa, synthetic construct
  REGION 1..25: note = Description of Artificial Sequence: Synthetic peptide
YKFVRIQPGQTFSVLACYNGSPSGV

SEQ ID NO: 14354 - protein, 25 aa, synthetic construct
  REGION 1..25: note = Description of Artificial Sequence: Synthetic peptide
KFVRIQPGQTFSVLACYNGSPSGVY

SEQ ID NO: 14355 - protein, 25 aa, synthetic construct
  REGION 1..25: note = Description of Artificial Sequence: Synthetic peptide
IQPGQTFSVLACYNGSPSGVYQCAM

SEQ ID NO: 14356 - protein, 25 aa, synthetic construct
  REGION 1..25: note = Description of Artificial Sequence: Synthetic peptide
KGVHFVCNLLLLFVTVYSHLLLVAA

SEQ ID NO: 14357 - protein, 25 aa, synthetic construct
  REGION 1..25: note = Description of Artificial Sequence: Synthetic peptide
FVCNLLLLFVTVYSHLLLVAAGLEA

SEQ ID NO: 14358 - protein, 25 aa, synthetic construct
  REGION 1..25: note = Description of Artificial Sequence: Synthetic peptide
CNLLLLFVTVYSHLLLVAAGLEAPF

SEQ ID NO: 14359 - protein, 25 aa, synthetic construct
  REGION 1..25: note = Description of Artificial Sequence: Synthetic peptide
VCNLLLLFVTVYSHLLLVAAGLEAP

SEQ ID NO: 14360 - protein, 25 aa, synthetic construct
  REGION 1..25: note = Description of Artificial Sequence: Synthetic peptide
CGSVGFNIDYDCVSFCYMHHMELPT

SEQ ID NO: 14361 - protein, 25 aa, synthetic construct
  REGION 1..25: note = Description of Artificial Sequence: Synthetic peptide
STECSNLLLQYGSFCTQLNRALTGI

SEQ ID NO: 14362 - protein, 25 aa, synthetic construct
  REGION 1..25: note = Description of Artificial Sequence: Synthetic peptide
DSTECSNLLLQYGSFCTQLNRALTG

SEQ ID NO: 14363 - protein, 25 aa, synthetic construct
  REGION 1..25: note = Description of Artificial Sequence: Synthetic peptide
GDSTECSNLLLQYGSFCTQLNRALT

SEQ ID NO: 14364 - protein, 25 aa, synthetic construct
  REGION 1..25: note = Description of Artificial Sequence: Synthetic peptide
GTITVEELKKLLEQWNLVIGFLFLT

SEQ ID NO: 14365 - protein, 25 aa, synthetic construct
  REGION 1..25: note = Description of Artificial Sequence: Synthetic peptide
CASYQTQTNSPRRARSVASQSIIAY

SEQ ID NO: 14366 - protein, 25 aa, synthetic construct
  REGION 1..25: note = Description of Artificial Sequence: Synthetic peptide
QPRVEKKKLDGFMGRIRSVYPVASP

SEQ ID NO: 14367 - protein, 25 aa, synthetic construct
  REGION 1..25: note = Description of Artificial Sequence: Synthetic peptide
RFASVYAWNRKRISNCVADYSVLYN

SEQ ID NO: 14368 - protein, 25 aa, synthetic construct
  REGION 1..25: note = Description of Artificial Sequence: Synthetic peptide
FASVYAWNRKRISNCVADYSVLYNS

SEQ ID NO: 14369 - protein, 25 aa, synthetic construct
  REGION 1..25: note = Description of Artificial Sequence: Synthetic peptide
LPNDDTLRVEAFEYYHTTDPSFLGR

SEQ ID NO: 14370 - protein, 25 aa, synthetic construct
  REGION 1..25: note = Description of Artificial Sequence: Synthetic peptide
PNDDTLRVEAFEYYHTTDPSFLGRY

SEQ ID NO: 14371 - protein, 25 aa, synthetic construct
  REGION 1..25: note = Description of Artificial Sequence: Synthetic peptide
SVVNIQKEIDRLNEVAKNLNESLID

SEQ ID NO: 14372 - protein, 25 aa, synthetic construct
  REGION 1..25: note = Description of Artificial Sequence: Synthetic peptide
LSRVLGLKTLATHGLAAVNSVPWDT

SEQ ID NO: 14373 - protein, 25 aa, synthetic construct
  REGION 1..25: note = Description of Artificial Sequence: Synthetic peptide
IWFLLLSVCLGSLIYSTAALGVLMS

SEQ ID NO: 14374 - protein, 25 aa, synthetic construct
  REGION 1..25: note = Description of Artificial Sequence: Synthetic peptide
KGIMMNVAKYTQLCQYLNTLTLAVP

SEQ ID NO: 14375 - protein, 25 aa, synthetic construct
  REGION 1..25: note = Description of Artificial Sequence: Synthetic peptide
PKGIMMNVAKYTQLCQYLNTLTLAV

SEQ ID NO: 14376 - protein, 25 aa, synthetic construct
  REGION 1..25: note = Description of Artificial Sequence: Synthetic peptide
TGCVIAWNSNNLDSKVGGNYNYLYR

SEQ ID NO: 14377 - protein, 25 aa, synthetic construct
  REGION 1..25: note = Description of Artificial Sequence: Synthetic peptide
FTGCVIAWNSNNLDSKVGGNYNYLY

SEQ ID NO: 14378 - protein, 25 aa, synthetic construct
  REGION 1..25: note = Description of Artificial Sequence: Synthetic peptide
NIDGYFKIYSKHTPINLVRDLPQGF

SEQ ID NO: 14379 - protein, 25 aa, synthetic construct
  REGION 1..25: note = Description of Artificial Sequence: Synthetic peptide
SDVGDSAEVAVKMFDAYVNTFSSTF

SEQ ID NO: 14380 - protein, 25 aa, synthetic construct
  REGION 1..25: note = Description of Artificial Sequence: Synthetic peptide
VSDVGDSAEVAVKMFDAYVNTFSST

SEQ ID NO: 14381 - protein, 25 aa, synthetic construct
  REGION 1..25: note = Description of Artificial Sequence: Synthetic peptide
LNQLTGYKKPASRELKVTFFPDLNG

SEQ ID NO: 14382 - protein, 25 aa, synthetic construct
  REGION 1..25: note = Description of Artificial Sequence: Synthetic peptide
VGTPVCINGLMLLEIKDTEKYCALA

SEQ ID NO: 14383 - protein, 25 aa, synthetic construct
  REGION 1..25: note = Description of Artificial Sequence: Synthetic peptide
PLVGTPVCINGLMLLEIKDTEKYCA

SEQ ID NO: 14384 - protein, 25 aa, synthetic construct
  REGION 1..25: note = Description of Artificial Sequence: Synthetic peptide
GTPVCINGLMLLEIKDTEKYCALAP

SEQ ID NO: 14385 - protein, 25 aa, synthetic construct
  REGION 1..25: note = Description of Artificial Sequence: Synthetic peptide
LVGTPVCINGLMLLEIKDTEKYCAL

SEQ ID NO: 14386 - protein, 25 aa, synthetic construct
  REGION 1..25: note = Description of Artificial Sequence: Synthetic peptide
TPVCINGLMLLEIKDTEKYCALAPN

SEQ ID NO: 14387 - protein, 25 aa, synthetic construct
  REGION 1..25: note = Description of Artificial Sequence: Synthetic peptide
TDDNALAYYNTTKGGRFVLALLSDL

SEQ ID NO: 14388 - protein, 25 aa, synthetic construct
  REGION 1..25: note = Description of Artificial Sequence: Synthetic peptide
MGRIRSVYPVASPNECNQMCLSTLM

SEQ ID NO: 14389 - protein, 25 aa, synthetic construct
  REGION 1..25: note = Description of Artificial Sequence: Synthetic peptide
QGAVDINKLCEEMLDNRATLQAIAS

SEQ ID NO: 14390 - protein, 25 aa, synthetic construct
  REGION 1..25: note = Description of Artificial Sequence: Synthetic peptide
GAVDINKLCEEMLDNRATLQAIASE

SEQ ID NO: 14391 - protein, 25 aa, synthetic construct
  REGION 1..25: note = Description of Artificial Sequence: Synthetic peptide
DMVDTSLSGFKLKDCVMYASAVVLL

SEQ ID NO: 14392 - protein, 25 aa, synthetic construct
  REGION 1..25: note = Description of Artificial Sequence: Synthetic peptide
WLDMVDTSLSGFKLKDCVMYASAVV

SEQ ID NO: 14393 - protein, 25 aa, synthetic construct
  REGION 1..25: note = Description of Artificial Sequence: Synthetic peptide
MVDTSLSGFKLKDCVMYASAVVLLI

SEQ ID NO: 14394 - protein, 25 aa, synthetic construct
  REGION 1..25: note = Description of Artificial Sequence: Synthetic peptide
LDMVDTSLSGFKLKDCVMYASAVVL

SEQ ID NO: 14395 - protein, 25 aa, synthetic construct
  REGION 1..25: note = Description of Artificial Sequence: Synthetic peptide
AGTTQTACTDDNALAYYNTTKGGRF

SEQ ID NO: 14396 - protein, 25 aa, synthetic construct
  REGION 1..25: note = Description of Artificial Sequence: Synthetic peptide
STQYEYGTEDDYQGKPLEFGATSAA

SEQ ID NO: 14397 - protein, 25 aa, synthetic construct
  REGION 1..25: note = Description of Artificial Sequence: Synthetic peptide
PSTQYEYGTEDDYQGKPLEFGATSA

SEQ ID NO: 14398 - protein, 25 aa, synthetic construct
  REGION 1..25: note = Description of Artificial Sequence: Synthetic peptide
EPSTQYEYGTEDDYQGKPLEFGATS

SEQ ID NO: 14399 - protein, 25 aa, synthetic construct
  REGION 1..25: note = Description of Artificial Sequence: Synthetic peptide
QYEYGTEDDYQGKPLEFGATSAALQ

SEQ ID NO: 14400 - protein, 25 aa, synthetic construct
  REGION 1..25: note = Description of Artificial Sequence: Synthetic peptide
EYGTEDDYQGKPLEFGATSAALQPE

SEQ ID NO: 14401 - protein, 25 aa, synthetic construct
  REGION 1..25: note = Description of Artificial Sequence: Synthetic peptide
YEYGTEDDYQGKPLEFGATSAALQP

SEQ ID NO: 14402 - protein, 25 aa, synthetic construct
  REGION 1..25: note = Description of Artificial Sequence: Synthetic peptide
LKLKVDTANPKTPKYKFVRIQPGQT

SEQ ID NO: 14403 - protein, 25 aa, synthetic construct
  REGION 1..25: note = Description of Artificial Sequence: Synthetic peptide
CTLKSFTVEKGIYQTSNFRVQPTES

SEQ ID NO: 14404 - protein, 25 aa, synthetic construct
  REGION 1..25: note = Description of Artificial Sequence: Synthetic peptide
AVIKTLQPVSELLTPLGIDLDEWSM

SEQ ID NO: 14405 - protein, 25 aa, synthetic construct
  REGION 1..25: note = Description of Artificial Sequence: Synthetic peptide
VIKTLQPVSELLTPLGIDLDEWSMA

SEQ ID NO: 14406 - protein, 25 aa, synthetic construct
  REGION 1..25: note = Description of Artificial Sequence: Synthetic peptide
PRHVICTSEDMLNPNYEDLLIRKSN

SEQ ID NO: 14407 - protein, 25 aa, synthetic construct
  REGION 1..25: note = Description of Artificial Sequence: Synthetic peptide
AGTDTTITVNVLAWLYAAVINGDRW

SEQ ID NO: 14408 - protein, 25 aa, synthetic construct
  REGION 1..25: note = Description of Artificial Sequence: Synthetic peptide
DVVNQNAQALNTLVKQLSSNFGAIS

SEQ ID NO: 14409 - protein, 25 aa, synthetic construct
  REGION 1..25: note = Description of Artificial Sequence: Synthetic peptide
VVNQNAQALNTLVKQLSSNFGAISS

SEQ ID NO: 14410 - protein, 25 aa, synthetic construct
  REGION 1..25: note = Description of Artificial Sequence: Synthetic peptide
CDIPIGAGICASYQTQTNSPRRARS

SEQ ID NO: 14411 - protein, 25 aa, synthetic construct
  REGION 1..25: note = Description of Artificial Sequence: Synthetic peptide
ECDIPIGAGICASYQTQTNSPRRAR

SEQ ID NO: 14412 - protein, 25 aa, synthetic construct
  REGION 1..25: note = Description of Artificial Sequence: Synthetic peptide
YECDIPIGAGICASYQTQTNSPRRA

SEQ ID NO: 14413 - protein, 25 aa, synthetic construct
  REGION 1..25: note = Description of Artificial Sequence: Synthetic peptide
EVAVKMFDAYVNTFSSTFNVPMEKL

SEQ ID NO: 14414 - protein, 25 aa, synthetic construct
  REGION 1..25: note = Description of Artificial Sequence: Synthetic peptide
VAVKMFDAYVNTFSSTFNVPMEKLK

SEQ ID NO: 14415 - protein, 25 aa, synthetic construct
  REGION 1..25: note = Description of Artificial Sequence: Synthetic peptide
GYLPQNAVVKIYCPACHNSEVGPEH

SEQ ID NO: 14416 - protein, 25 aa, synthetic construct
  REGION 1..25: note = Description of Artificial Sequence: Synthetic peptide
EVPVAIHADQLTPTWRVYSTGSNVF

SEQ ID NO: 14417 - protein, 25 aa, synthetic construct
  REGION 1..25: note = Description of Artificial Sequence: Synthetic peptide
TEVPVAIHADQLTPTWRVYSTGSNV

SEQ ID NO: 14418 - protein, 25 aa, synthetic construct
  REGION 1..25: note = Description of Artificial Sequence: Synthetic peptide
CTEVPVAIHADQLTPTWRVYSTGSN

SEQ ID NO: 14419 - protein, 25 aa, synthetic construct
  REGION 1..25: note = Description of Artificial Sequence: Synthetic peptide
QKVGMQKYSTLQGPPGTGKSHFAIG

SEQ ID NO: 14420 - protein, 25 aa, synthetic construct
  REGION 1..25: note = Description of Artificial Sequence: Synthetic peptide
KVGMQKYSTLQGPPGTGKSHFAIGL

SEQ ID NO: 14421 - protein, 25 aa, synthetic construct
  REGION 1..25: note = Description of Artificial Sequence: Synthetic peptide
VDADSKIVQLSEISMDNSPNLAWPL

SEQ ID NO: 14422 - protein, 25 aa, synthetic construct
  REGION 1..25: note = Description of Artificial Sequence: Synthetic peptide
GEAANFCALILAYCNKTVGELGDVR

SEQ ID NO: 14423 - protein, 25 aa, synthetic construct
  REGION 1..25: note = Description of Artificial Sequence: Synthetic peptide
RAGEAANFCALILAYCNKTVGELGD

SEQ ID NO: 14424 - protein, 25 aa, synthetic construct
  REGION 1..25: note = Description of Artificial Sequence: Synthetic peptide
AGEAANFCALILAYCNKTVGELGDV

SEQ ID NO: 14425 - protein, 25 aa, synthetic construct
  REGION 1..25: note = Description of Artificial Sequence: Synthetic peptide
LVATAEAELAKNVSLDNVLSTFISA

SEQ ID NO: 14426 - protein, 25 aa, synthetic construct
  REGION 1..25: note = Description of Artificial Sequence: Synthetic peptide
VATAEAELAKNVSLDNVLSTFISAA

SEQ ID NO: 14427 - protein, 25 aa, synthetic construct
  REGION 1..25: note = Description of Artificial Sequence: Synthetic peptide
PGVYSVIYLYLTFYLTNDVSFLAHI

SEQ ID NO: 14428 - protein, 25 aa, synthetic construct
  REGION 1..25: note = Description of Artificial Sequence: Synthetic peptide
LPGVYSVIYLYLTFYLTNDVSFLAH

SEQ ID NO: 14429 - protein, 25 aa, synthetic construct
  REGION 1..25: note = Description of Artificial Sequence: Synthetic peptide
NFCALILAYCNKTVGELGDVRETMS

SEQ ID NO: 14430 - protein, 25 aa, synthetic construct
  REGION 1..25: note = Description of Artificial Sequence: Synthetic peptide
CALILAYCNKTVGELGDVRETMSYL

SEQ ID NO: 14431 - protein, 25 aa, synthetic construct
  REGION 1..25: note = Description of Artificial Sequence: Synthetic peptide
FCALILAYCNKTVGELGDVRETMSY

SEQ ID NO: 14432 - protein, 25 aa, synthetic construct
  REGION 1..25: note = Description of Artificial Sequence: Synthetic peptide
KSNHNFLVQAGNVQLRVIGHSMQNC

SEQ ID NO: 14433 - protein, 25 aa, synthetic construct
  REGION 1..25: note = Description of Artificial Sequence: Synthetic peptide
RKSNHNFLVQAGNVQLRVIGHSMQN

SEQ ID NO: 14434 - protein, 25 aa, synthetic construct
  REGION 1..25: note = Description of Artificial Sequence: Synthetic peptide
RYFRLTLGVYDYLVSTQEFRYMNSQ

SEQ ID NO: 14435 - protein, 25 aa, synthetic construct
  REGION 1..25: note = Description of Artificial Sequence: Synthetic peptide
LMSFPQSAPHGVVFLHVTYVPAQEK

SEQ ID NO: 14436 - protein, 25 aa, synthetic construct
  REGION 1..25: note = Description of Artificial Sequence: Synthetic peptide
NALAYYNTTKGGRFVLALLSDLQDL

SEQ ID NO: 14437 - protein, 25 aa, synthetic construct
  REGION 1..25: note = Description of Artificial Sequence: Synthetic peptide
YQGKPLEFGATSAALQPEEEQEEDW

SEQ ID NO: 14438 - protein, 25 aa, synthetic construct
  REGION 1..25: note = Description of Artificial Sequence: Synthetic peptide
KPLEFGATSAALQPEEEQEEDWLDD

SEQ ID NO: 14439 - protein, 25 aa, synthetic construct
  REGION 1..25: note = Description of Artificial Sequence: Synthetic peptide
DYQGKPLEFGATSAALQPEEEQEED

SEQ ID NO: 14440 - protein, 25 aa, synthetic construct
  REGION 1..25: note = Description of Artificial Sequence: Synthetic peptide
DDYQGKPLEFGATSAALQPEEEQEE

SEQ ID NO: 14441 - protein, 25 aa, synthetic construct
  REGION 1..25: note = Description of Artificial Sequence: Synthetic peptide
QGKPLEFGATSAALQPEEEQEEDWL

SEQ ID NO: 14442 - protein, 25 aa, synthetic construct
  REGION 1..25: note = Description of Artificial Sequence: Synthetic peptide
GKPLEFGATSAALQPEEEQEEDWLD

SEQ ID NO: 14443 - protein, 25 aa, synthetic construct
  REGION 1..25: note = Description of Artificial Sequence: Synthetic peptide
VMFTPLVPFWITIAYIICISTKHFY

SEQ ID NO: 14444 - protein, 25 aa, synthetic construct
  REGION 1..25: note = Description of Artificial Sequence: Synthetic peptide
KGGKIVNNWLKQLIKVTLVFLFVAA

SEQ ID NO: 14445 - protein, 25 aa, synthetic construct
  REGION 1..25: note = Description of Artificial Sequence: Synthetic peptide
FKLKDCVMYASAVVLLILMTARTVY

SEQ ID NO: 14446 - protein, 25 aa, synthetic construct
  REGION 1..25: note = Description of Artificial Sequence: Synthetic peptide
PQTSITSAVLQSGFRKMAFPSGKVE

SEQ ID NO: 14447 - protein, 25 aa, synthetic construct
  REGION 1..25: note = Description of Artificial Sequence: Synthetic peptide
QTSITSAVLQSGFRKMAFPSGKVEG

SEQ ID NO: 14448 - protein, 25 aa, synthetic construct
  REGION 1..25: note = Description of Artificial Sequence: Synthetic peptide
LNRFTTTLNDFNLVAMKYNYEPLTQ

SEQ ID NO: 14449 - protein, 25 aa, synthetic construct
  REGION 1..25: note = Description of Artificial Sequence: Synthetic peptide
PINVIVFDGKSKCEESSAKSASVYY

SEQ ID NO: 14450 - protein, 25 aa, synthetic construct
  REGION 1..25: note = Description of Artificial Sequence: Synthetic peptide
QLSLPVLQVRDVLVRGFGDSVEEVL

SEQ ID NO: 14451 - protein, 25 aa, synthetic construct
  REGION 1..25: note = Description of Artificial Sequence: Synthetic peptide
HVQLSLPVLQVRDVLVRGFGDSVEE

SEQ ID NO: 14452 - protein, 25 aa, synthetic construct
  REGION 1..25: note = Description of Artificial Sequence: Synthetic peptide
VQLSLPVLQVRDVLVRGFGDSVEEV

SEQ ID NO: 14453 - protein, 25 aa, synthetic construct
  REGION 1..25: note = Description of Artificial Sequence: Synthetic peptide
LSLPVLQVRDVLVRGFGDSVEEVLS

SEQ ID NO: 14454 - protein, 25 aa, synthetic construct
  REGION 1..25: note = Description of Artificial Sequence: Synthetic peptide
EDDYQGKPLEFGATSAALQPEEEQE

SEQ ID NO: 14455 - protein, 25 aa, synthetic construct
  REGION 1..25: note = Description of Artificial Sequence: Synthetic peptide
TEDDYQGKPLEFGATSAALQPEEEQ

SEQ ID NO: 14456 - protein, 25 aa, synthetic construct
  REGION 1..25: note = Description of Artificial Sequence: Synthetic peptide
YLFQHANLDSCKRVLNVVCKTCGQQ

SEQ ID NO: 14457 - protein, 25 aa, synthetic construct
  REGION 1..25: note = Description of Artificial Sequence: Synthetic peptide
IDRLITGRLQSLQTYVTQQLIRAAE

SEQ ID NO: 14458 - protein, 25 aa, synthetic construct
  REGION 1..25: note = Description of Artificial Sequence: Synthetic peptide
VQIDRLITGRLQSLQTYVTQQLIRA

SEQ ID NO: 14459 - protein, 25 aa, synthetic construct
  REGION 1..25: note = Description of Artificial Sequence: Synthetic peptide
QIDRLITGRLQSLQTYVTQQLIRAA

SEQ ID NO: 14460 - protein, 25 aa, synthetic construct
  REGION 1..25: note = Description of Artificial Sequence: Synthetic peptide
EVQIDRLITGRLQSLQTYVTQQLIR

SEQ ID NO: 14461 - protein, 25 aa, synthetic construct
  REGION 1..25: note = Description of Artificial Sequence: Synthetic peptide
PKSDGTGTIYTELEPPCRFVTDTPK

SEQ ID NO: 14462 - protein, 25 aa, synthetic construct
  REGION 1..25: note = Description of Artificial Sequence: Synthetic peptide
YCPIFFITGNTLQCIMLVYCFLGYF

SEQ ID NO: 14463 - protein, 25 aa, synthetic construct
  REGION 1..25: note = Description of Artificial Sequence: Synthetic peptide
EYCPIFFITGNTLQCIMLVYCFLGY

SEQ ID NO: 14464 - protein, 25 aa, synthetic construct
  REGION 1..25: note = Description of Artificial Sequence: Synthetic peptide
IVFMCVEYCPIFFITGNTLQCIMLV

SEQ ID NO: 14465 - protein, 25 aa, synthetic construct
  REGION 1..25: note = Description of Artificial Sequence: Synthetic peptide
CVEYCPIFFITGNTLQCIMLVYCFL

SEQ ID NO: 14466 - protein, 25 aa, synthetic construct
  REGION 1..25: note = Description of Artificial Sequence: Synthetic peptide
MCVEYCPIFFITGNTLQCIMLVYCF

SEQ ID NO: 14467 - protein, 25 aa, synthetic construct
  REGION 1..25: note = Description of Artificial Sequence: Synthetic peptide
VEYCPIFFITGNTLQCIMLVYCFLG

SEQ ID NO: 14468 - protein, 25 aa, synthetic construct
  REGION 1..25: note = Description of Artificial Sequence: Synthetic peptide
FMCVEYCPIFFITGNTLQCIMLVYC

SEQ ID NO: 14469 - protein, 25 aa, synthetic construct
  REGION 1..25: note = Description of Artificial Sequence: Synthetic peptide
VFMCVEYCPIFFITGNTLQCIMLVY

SEQ ID NO: 14470 - protein, 25 aa, synthetic construct
  REGION 1..25: note = Description of Artificial Sequence: Synthetic peptide
SDLQDLKWARFPKSDGTGTIYTELE

SEQ ID NO: 14471 - protein, 25 aa, synthetic construct
  REGION 1..25: note = Description of Artificial Sequence: Synthetic peptide
PKGPKVKYLYFIKGLNNLNRGMVLG

SEQ ID NO: 14472 - protein, 25 aa, synthetic construct
  REGION 1..25: note = Description of Artificial Sequence: Synthetic peptide
DTPKGPKVKYLYFIKGLNNLNRGMV

SEQ ID NO: 14473 - protein, 25 aa, synthetic construct
  REGION 1..25: note = Description of Artificial Sequence: Synthetic peptide
TPKGPKVKYLYFIKGLNNLNRGMVL

SEQ ID NO: 14474 - protein, 25 aa, synthetic construct
  REGION 1..25: note = Description of Artificial Sequence: Synthetic peptide
TDTPKGPKVKYLYFIKGLNNLNRGM

SEQ ID NO: 14475 - protein, 25 aa, synthetic construct
  REGION 1..25: note = Description of Artificial Sequence: Synthetic peptide
VLSGHNLAKHCLHVVGPNVNKGEDI

SEQ ID NO: 14476 - protein, 25 aa, synthetic construct
  REGION 1..25: note = Description of Artificial Sequence: Synthetic peptide
LSGHNLAKHCLHVVGPNVNKGEDIQ

SEQ ID NO: 14477 - protein, 25 aa, synthetic construct
  REGION 1..25: note = Description of Artificial Sequence: Synthetic peptide
RELKVTFFPDLNGDVVAIDYKHYTP

SEQ ID NO: 14478 - protein, 25 aa, synthetic construct
  REGION 1..25: note = Description of Artificial Sequence: Synthetic peptide
VLQVRDVLVRGFGDSVEEVLSEARQ

SEQ ID NO: 14479 - protein, 25 aa, synthetic construct
  REGION 1..25: note = Description of Artificial Sequence: Synthetic peptide
LQVRDVLVRGFGDSVEEVLSEARQH

SEQ ID NO: 14480 - protein, 25 aa, synthetic construct
  REGION 1..25: note = Description of Artificial Sequence: Synthetic peptide
QVRDVLVRGFGDSVEEVLSEARQHL

SEQ ID NO: 14481 - protein, 25 aa, synthetic construct
  REGION 1..25: note = Description of Artificial Sequence: Synthetic peptide
PVLQVRDVLVRGFGDSVEEVLSEAR

SEQ ID NO: 14482 - protein, 25 aa, synthetic construct
  REGION 1..25: note = Description of Artificial Sequence: Synthetic peptide
RKHTTCCSLSHRFYRLANECAQVLS

SEQ ID NO: 14483 - protein, 25 aa, synthetic construct
  REGION 1..25: note = Description of Artificial Sequence: Synthetic peptide
YQKVGMQKYSTLQGPPGTGKSHFAI

SEQ ID NO: 14484 - protein, 25 aa, synthetic construct
  REGION 1..25: note = Description of Artificial Sequence: Synthetic peptide
ANYQKVGMQKYSTLQGPPGTGKSHF

SEQ ID NO: 14485 - protein, 25 aa, synthetic construct
  REGION 1..25: note = Description of Artificial Sequence: Synthetic peptide
NYQKVGMQKYSTLQGPPGTGKSHFA

SEQ ID NO: 14486 - protein, 25 aa, synthetic construct
  REGION 1..25: note = Description of Artificial Sequence: Synthetic peptide
VANYQKVGMQKYSTLQGPPGTGKSH

SEQ ID NO: 14487 - protein, 25 aa, synthetic construct
  REGION 1..25: note = Description of Artificial Sequence: Synthetic peptide
VRRSFYVYANGGKGFCKLHNWNCVN

SEQ ID NO: 14488 - protein, 25 aa, synthetic construct
  REGION 1..25: note = Description of Artificial Sequence: Synthetic peptide
AKNRARTVAGVSICSTMTNRQFHQK

SEQ ID NO: 14489 - protein, 25 aa, synthetic construct
  REGION 1..25: note = Description of Artificial Sequence: Synthetic peptide
VAGVSICSTMTNRQFHQKLLKSIAA

SEQ ID NO: 14490 - protein, 25 aa, synthetic construct
  REGION 1..25: note = Description of Artificial Sequence: Synthetic peptide
AGVSICSTMTNRQFHQKLLKSIAAT

SEQ ID NO: 14491 - protein, 25 aa, synthetic construct
  REGION 1..25: note = Description of Artificial Sequence: Synthetic peptide
ARTVAGVSICSTMTNRQFHQKLLKS

SEQ ID NO: 14492 - protein, 25 aa, synthetic construct
  REGION 1..25: note = Description of Artificial Sequence: Synthetic peptide
TVAGVSICSTMTNRQFHQKLLKSIA

SEQ ID NO: 14493 - protein, 25 aa, synthetic construct
  REGION 1..25: note = Description of Artificial Sequence: Synthetic peptide
RARTVAGVSICSTMTNRQFHQKLLK

SEQ ID NO: 14494 - protein, 25 aa, synthetic construct
  REGION 1..25: note = Description of Artificial Sequence: Synthetic peptide
NRARTVAGVSICSTMTNRQFHQKLL

SEQ ID NO: 14495 - protein, 25 aa, synthetic construct
  REGION 1..25: note = Description of Artificial Sequence: Synthetic peptide
RTVAGVSICSTMTNRQFHQKLLKSI

SEQ ID NO: 14496 - protein, 25 aa, synthetic construct
  REGION 1..25: note = Description of Artificial Sequence: Synthetic peptide
KNRARTVAGVSICSTMTNRQFHQKL

SEQ ID NO: 14497 - protein, 25 aa, synthetic construct
  REGION 1..25: note = Description of Artificial Sequence: Synthetic peptide
SAKNRARTVAGVSICSTMTNRQFHQ

SEQ ID NO: 14498 - protein, 25 aa, synthetic construct
  REGION 1..25: note = Description of Artificial Sequence: Synthetic peptide
GHVMVELVAELEGIQYGRSGETLGV

SEQ ID NO: 14499 - protein, 25 aa, synthetic construct
  REGION 1..25: note = Description of Artificial Sequence: Synthetic peptide
PHGHVMVELVAELEGIQYGRSGETL

SEQ ID NO: 14500 - protein, 25 aa, synthetic construct
  REGION 1..25: note = Description of Artificial Sequence: Synthetic peptide
RTAPHGHVMVELVAELEGIQYGRSG

SEQ ID NO: 14501 - protein, 25 aa, synthetic construct
  REGION 1..25: note = Description of Artificial Sequence: Synthetic peptide
HGHVMVELVAELEGIQYGRSGETLG

SEQ ID NO: 14502 - protein, 25 aa, synthetic construct
  REGION 1..25: note = Description of Artificial Sequence: Synthetic peptide
TAPHGHVMVELVAELEGIQYGRSGE

SEQ ID NO: 14503 - protein, 25 aa, synthetic construct
  REGION 1..25: note = Description of Artificial Sequence: Synthetic peptide
HVMVELVAELEGIQYGRSGETLGVL

SEQ ID NO: 14504 - protein, 25 aa, synthetic construct
  REGION 1..25: note = Description of Artificial Sequence: Synthetic peptide
APHGHVMVELVAELEGIQYGRSGET

SEQ ID NO: 14505 - protein, 25 aa, synthetic construct
  REGION 1..25: note = Description of Artificial Sequence: Synthetic peptide
SHGKQVVSDIDYVPLKSATCITRCN

SEQ ID NO: 14506 - protein, 25 aa, synthetic construct
  REGION 1..25: note = Description of Artificial Sequence: Synthetic peptide
KQVVSDIDYVPLKSATCITRCNLGG

SEQ ID NO: 14507 - protein, 25 aa, synthetic construct
  REGION 1..25: note = Description of Artificial Sequence: Synthetic peptide
GKQVVSDIDYVPLKSATCITRCNLG

SEQ ID NO: 14508 - protein, 25 aa, synthetic construct
  REGION 1..25: note = Description of Artificial Sequence: Synthetic peptide
HGKQVVSDIDYVPLKSATCITRCNL

SEQ ID NO: 14509 - protein, 25 aa, synthetic construct
  REGION 1..25: note = Description of Artificial Sequence: Synthetic peptide
VVSDIDYVPLKSATCITRCNLGGAV

SEQ ID NO: 14510 - protein, 25 aa, synthetic construct
  REGION 1..25: note = Description of Artificial Sequence: Synthetic peptide
QVVSDIDYVPLKSATCITRCNLGGA

SEQ ID NO: 14511 - protein, 25 aa, synthetic construct
  REGION 1..25: note = Description of Artificial Sequence: Synthetic peptide
RFQTLLALHRSYLTPGDSSSGWTAG

SEQ ID NO: 14512 - protein, 25 aa, synthetic construct
  REGION 1..25: note = Description of Artificial Sequence: Synthetic peptide
FQTLLALHRSYLTPGDSSSGWTAGA

SEQ ID NO: 14513 - protein, 25 aa, synthetic construct
  REGION 1..25: note = Description of Artificial Sequence: Synthetic peptide
IDKVLNEKCSAYTVELGTEVNEFAC

SEQ ID NO: 14514 - protein, 25 aa, synthetic construct
  REGION 1..25: note = Description of Artificial Sequence: Synthetic peptide
KVLNEKCSAYTVELGTEVNEFACVV

SEQ ID NO: 14515 - protein, 25 aa, synthetic construct
  REGION 1..25: note = Description of Artificial Sequence: Synthetic peptide
DKVLNEKCSAYTVELGTEVNEFACV

SEQ ID NO: 14516 - protein, 25 aa, synthetic construct
  REGION 1..25: note = Description of Artificial Sequence: Synthetic peptide
ERIDKVLNEKCSAYTVELGTEVNEF

SEQ ID NO: 14517 - protein, 25 aa, synthetic construct
  REGION 1..25: note = Description of Artificial Sequence: Synthetic peptide
DERIDKVLNEKCSAYTVELGTEVNE

SEQ ID NO: 14518 - protein, 25 aa, synthetic construct
  REGION 1..25: note = Description of Artificial Sequence: Synthetic peptide
VLNEKCSAYTVELGTEVNEFACVVA

SEQ ID NO: 14519 - protein, 25 aa, synthetic construct
  REGION 1..25: note = Description of Artificial Sequence: Synthetic peptide
RIDKVLNEKCSAYTVELGTEVNEFA

SEQ ID NO: 14520 - protein, 25 aa, synthetic construct
  REGION 1..25: note = Description of Artificial Sequence: Synthetic peptide
YFTSDYYQLYSTQLSTDTGVEHVTF

SEQ ID NO: 14521 - protein, 25 aa, synthetic construct
  REGION 1..25: note = Description of Artificial Sequence: Synthetic peptide
LHSYFTSDYYQLYSTQLSTDTGVEH

SEQ ID NO: 14522 - protein, 25 aa, synthetic construct
  REGION 1..25: note = Description of Artificial Sequence: Synthetic peptide
VVLHSYFTSDYYQLYSTQLSTDTGV

SEQ ID NO: 14523 - protein, 25 aa, synthetic construct
  REGION 1..25: note = Description of Artificial Sequence: Synthetic peptide
HSYFTSDYYQLYSTQLSTDTGVEHV

SEQ ID NO: 14524 - protein, 25 aa, synthetic construct
  REGION 1..25: note = Description of Artificial Sequence: Synthetic peptide
SYFTSDYYQLYSTQLSTDTGVEHVT

SEQ ID NO: 14525 - protein, 25 aa, synthetic construct
  REGION 1..25: note = Description of Artificial Sequence: Synthetic peptide
FTSDYYQLYSTQLSTDTGVEHVTFF

SEQ ID NO: 14526 - protein, 25 aa, synthetic construct
  REGION 1..25: note = Description of Artificial Sequence: Synthetic peptide
VLHSYFTSDYYQLYSTQLSTDTGVE

SEQ ID NO: 14527 - protein, 25 aa, synthetic construct
  REGION 1..25: note = Description of Artificial Sequence: Synthetic peptide
ELWAKRNIKPVPEVKILNNLGVDIA

SEQ ID NO: 14528 - protein, 25 aa, synthetic construct
  REGION 1..25: note = Description of Artificial Sequence: Synthetic peptide
KIQDSLSSTASALGKLQDVVNQNAQ

SEQ ID NO: 14529 - protein, 25 aa, synthetic construct
  REGION 1..25: note = Description of Artificial Sequence: Synthetic peptide
IGKIQDSLSSTASALGKLQDVVNQN

SEQ ID NO: 14530 - protein, 25 aa, synthetic construct
  REGION 1..25: note = Description of Artificial Sequence: Synthetic peptide
SAIGKIQDSLSSTASALGKLQDVVN

SEQ ID NO: 14531 - protein, 25 aa, synthetic construct
  REGION 1..25: note = Description of Artificial Sequence: Synthetic peptide
IQDSLSSTASALGKLQDVVNQNAQA

SEQ ID NO: 14532 - protein, 25 aa, synthetic construct
  REGION 1..25: note = Description of Artificial Sequence: Synthetic peptide
AIGKIQDSLSSTASALGKLQDVVNQ

SEQ ID NO: 14533 - protein, 25 aa, synthetic construct
  REGION 1..25: note = Description of Artificial Sequence: Synthetic peptide
GKIQDSLSSTASALGKLQDVVNQNA

SEQ ID NO: 14534 - protein, 25 aa, synthetic construct
  REGION 1..25: note = Description of Artificial Sequence: Synthetic peptide
AARVVRSIFSRTLETAQNSVRVLQK

SEQ ID NO: 14535 - protein, 25 aa, synthetic construct
  REGION 1..25: note = Description of Artificial Sequence: Synthetic peptide
NAVVKIYCPACHNSEVGPEHSLAEY

SEQ ID NO: 14536 - protein, 25 aa, synthetic construct
  REGION 1..25: note = Description of Artificial Sequence: Synthetic peptide
SIIKTIQPRVEKKKLDGFMGRIRSV

SEQ ID NO: 14537 - protein, 25 aa, synthetic construct
  REGION 1..25: note = Description of Artificial Sequence: Synthetic peptide
YLTSSSKTPEEHFIETISLAGSYKD

SEQ ID NO: 14538 - protein, 25 aa, synthetic construct
  REGION 1..25: note = Description of Artificial Sequence: Synthetic peptide
GEDIQLLKSAYENFNQHEVLLAPLL

SEQ ID NO: 14539 - protein, 25 aa, synthetic construct
  REGION 1..25: note = Description of Artificial Sequence: Synthetic peptide
GIFGADPIHSLRVCVDTVRTNVYLA

SEQ ID NO: 14540 - protein, 25 aa, synthetic construct
  REGION 1..25: note = Description of Artificial Sequence: Synthetic peptide
IFGADPIHSLRVCVDTVRTNVYLAV

SEQ ID NO: 14541 - protein, 25 aa, synthetic construct
  REGION 1..25: note = Description of Artificial Sequence: Synthetic peptide
YVGYLQPRTFLLKYNENGTITDAVD

SEQ ID NO: 14542 - protein, 25 aa, synthetic construct
  REGION 1..25: note = Description of Artificial Sequence: Synthetic peptide
GYLQPRTFLLKYNENGTITDAVDCA

SEQ ID NO: 14543 - protein, 25 aa, synthetic construct
  REGION 1..25: note = Description of Artificial Sequence: Synthetic peptide
YLQPRTFLLKYNENGTITDAVDCAL

SEQ ID NO: 14544 - protein, 25 aa, synthetic construct
  REGION 1..25: note = Description of Artificial Sequence: Synthetic peptide
VGYLQPRTFLLKYNENGTITDAVDC

SEQ ID NO: 14545 - protein, 25 aa, synthetic construct
  REGION 1..25: note = Description of Artificial Sequence: Synthetic peptide
YYVGYLQPRTFLLKYNENGTITDAV

SEQ ID NO: 14546 - protein, 25 aa, synthetic construct
  REGION 1..25: note = Description of Artificial Sequence: Synthetic peptide
LQDLKWARFPKSDGTGTIYTELEPP

SEQ ID NO: 14547 - protein, 25 aa, synthetic construct
  REGION 1..25: note = Description of Artificial Sequence: Synthetic peptide
AIGLALYYPSARIVYTACSHAAVDA

SEQ ID NO: 14548 - protein, 25 aa, synthetic construct
  REGION 1..25: note = Description of Artificial Sequence: Synthetic peptide
FQEKDEDDNLIDSYFVVKRHTFSNY

SEQ ID NO: 14549 - protein, 25 aa, synthetic construct
  REGION 1..25: note = Description of Artificial Sequence: Synthetic peptide
RFQEKDEDDNLIDSYFVVKRHTFSN

SEQ ID NO: 14550 - protein, 25 aa, synthetic construct
  REGION 1..25: note = Description of Artificial Sequence: Synthetic peptide
LHVVGPNVNKGEDIQLLKSAYENFN

SEQ ID NO: 14551 - protein, 25 aa, synthetic construct
  REGION 1..25: note = Description of Artificial Sequence: Synthetic peptide
HCLHVVGPNVNKGEDIQLLKSAYEN

SEQ ID NO: 14552 - protein, 25 aa, synthetic construct
  REGION 1..25: note = Description of Artificial Sequence: Synthetic peptide
CLHVVGPNVNKGEDIQLLKSAYENF

SEQ ID NO: 14553 - protein, 25 aa, synthetic construct
  REGION 1..25: note = Description of Artificial Sequence: Synthetic peptide
LEPPCRFVTDTPKGPKVKYLYFIKG

SEQ ID NO: 14554 - protein, 25 aa, synthetic construct
  REGION 1..25: note = Description of Artificial Sequence: Synthetic peptide
YTELEPPCRFVTDTPKGPKVKYLYF

SEQ ID NO: 14555 - protein, 25 aa, synthetic construct
  REGION 1..25: note = Description of Artificial Sequence: Synthetic peptide
PPCRFVTDTPKGPKVKYLYFIKGLN

SEQ ID NO: 14556 - protein, 25 aa, synthetic construct
  REGION 1..25: note = Description of Artificial Sequence: Synthetic peptide
ELEPPCRFVTDTPKGPKVKYLYFIK

SEQ ID NO: 14557 - protein, 25 aa, synthetic construct
  REGION 1..25: note = Description of Artificial Sequence: Synthetic peptide
EPPCRFVTDTPKGPKVKYLYFIKGL

SEQ ID NO: 14558 - protein, 25 aa, synthetic construct
  REGION 1..25: note = Description of Artificial Sequence: Synthetic peptide
TELEPPCRFVTDTPKGPKVKYLYFI

SEQ ID NO: 14559 - protein, 25 aa, synthetic construct
  REGION 1..25: note = Description of Artificial Sequence: Synthetic peptide
ECTTIVNGVRRSFYVYANGGKGFCK

SEQ ID NO: 14560 - protein, 25 aa, synthetic construct
  REGION 1..25: note = Description of Artificial Sequence: Synthetic peptide
CTTIVNGVRRSFYVYANGGKGFCKL

SEQ ID NO: 14561 - protein, 25 aa, synthetic construct
  REGION 1..25: note = Description of Artificial Sequence: Synthetic peptide
YTERSEKSYELQTPFEIKLAKKFDT

SEQ ID NO: 14562 - protein, 25 aa, synthetic construct
  REGION 1..25: note = Description of Artificial Sequence: Synthetic peptide
WYTERSEKSYELQTPFEIKLAKKFD

SEQ ID NO: 14563 - protein, 25 aa, synthetic construct
  REGION 1..25: note = Description of Artificial Sequence: Synthetic peptide
AWYTERSEKSYELQTPFEIKLAKKF

SEQ ID NO: 14564 - protein, 25 aa, synthetic construct
  REGION 1..25: note = Description of Artificial Sequence: Synthetic peptide
FYTSKTTVASLINTLNDLNETLVTM

SEQ ID NO: 14565 - protein, 25 aa, synthetic construct
  REGION 1..25: note = Description of Artificial Sequence: Synthetic peptide
SKTTVASLINTLNDLNETLVTMPLG

SEQ ID NO: 14566 - protein, 25 aa, synthetic construct
  REGION 1..25: note = Description of Artificial Sequence: Synthetic peptide
YTSKTTVASLINTLNDLNETLVTMP

SEQ ID NO: 14567 - protein, 25 aa, synthetic construct
  REGION 1..25: note = Description of Artificial Sequence: Synthetic peptide
TSKTTVASLINTLNDLNETLVTMPL

SEQ ID NO: 14568 - protein, 25 aa, synthetic construct
  REGION 1..25: note = Description of Artificial Sequence: Synthetic peptide
KTTVASLINTLNDLNETLVTMPLGY

SEQ ID NO: 14569 - protein, 25 aa, synthetic construct
  REGION 1..25: note = Description of Artificial Sequence: Synthetic peptide
EHEIAWYTERSEKSYELQTPFEIKL

SEQ ID NO: 14570 - protein, 25 aa, synthetic construct
  REGION 1..25: note = Description of Artificial Sequence: Synthetic peptide
HEHEIAWYTERSEKSYELQTPFEIK

SEQ ID NO: 14571 - protein, 25 aa, synthetic construct
  REGION 1..25: note = Description of Artificial Sequence: Synthetic peptide
ARFYFYTSKTTVASLINTLNDLNET

SEQ ID NO: 14572 - protein, 25 aa, synthetic construct
  REGION 1..25: note = Description of Artificial Sequence: Synthetic peptide
RFYFYTSKTTVASLINTLNDLNETL

SEQ ID NO: 14573 - protein, 25 aa, synthetic construct
  REGION 1..25: note = Description of Artificial Sequence: Synthetic peptide
FYFYTSKTTVASLINTLNDLNETLV

SEQ ID NO: 14574 - protein, 25 aa, synthetic construct
  REGION 1..25: note = Description of Artificial Sequence: Synthetic peptide
IIKTIQPRVEKKKLDGFMGRIRSVY

SEQ ID NO: 14575 - protein, 25 aa, synthetic construct
  REGION 1..25: note = Description of Artificial Sequence: Synthetic peptide
PQLEQPYVFIKRSDARTAPHGHVMV

SEQ ID NO: 14576 - protein, 25 aa, synthetic construct
  REGION 1..25: note = Description of Artificial Sequence: Synthetic peptide
QLEQPYVFIKRSDARTAPHGHVMVE

SEQ ID NO: 14577 - protein, 25 aa, synthetic construct
  REGION 1..25: note = Description of Artificial Sequence: Synthetic peptide
LEQPYVFIKRSDARTAPHGHVMVEL

SEQ ID NO: 14578 - protein, 25 aa, synthetic construct
  REGION 1..25: note = Description of Artificial Sequence: Synthetic peptide
VLPQLEQPYVFIKRSDARTAPHGHV

SEQ ID NO: 14579 - protein, 25 aa, synthetic construct
  REGION 1..25: note = Description of Artificial Sequence: Synthetic peptide
LPQLEQPYVFIKRSDARTAPHGHVM

SEQ ID NO: 14580 - protein, 25 aa, synthetic construct
  REGION 1..25: note = Description of Artificial Sequence: Synthetic peptide
NKEMYLKLRSDVLLPLTQYNRYLAL

SEQ ID NO: 14581 - protein, 25 aa, synthetic construct
  REGION 1..25: note = Description of Artificial Sequence: Synthetic peptide
LNKEMYLKLRSDVLLPLTQYNRYLA

SEQ ID NO: 14582 - protein, 25 aa, synthetic construct
  REGION 1..25: note = Description of Artificial Sequence: Synthetic peptide
TLVSDIDITFLKKDAPYIVGDVVQE

SEQ ID NO: 14583 - protein, 25 aa, synthetic construct
  REGION 1..25: note = Description of Artificial Sequence: Synthetic peptide
LVSDIDITFLKKDAPYIVGDVVQEG

SEQ ID NO: 14584 - protein, 25 aa, synthetic construct
  REGION 1..25: note = Description of Artificial Sequence: Synthetic peptide
VSDIDITFLKKDAPYIVGDVVQEGV

SEQ ID NO: 14585 - protein, 25 aa, synthetic construct
  REGION 1..25: note = Description of Artificial Sequence: Synthetic peptide
NYLKSPNFSKLINIIIWFLLLSVCL

SEQ ID NO: 14586 - protein, 25 aa, synthetic construct
  REGION 1..25: note = Description of Artificial Sequence: Synthetic peptide
YLKSPNFSKLINIIIWFLLLSVCLG

SEQ ID NO: 14587 - protein, 25 aa, synthetic construct
  REGION 1..25: note = Description of Artificial Sequence: Synthetic peptide
SFNYLKSPNFSKLINIIIWFLLLSV

SEQ ID NO: 14588 - protein, 25 aa, synthetic construct
  REGION 1..25: note = Description of Artificial Sequence: Synthetic peptide
FNYLKSPNFSKLINIIIWFLLLSVC

SEQ ID NO: 14589 - protein, 25 aa, synthetic construct
  REGION 1..25: note = Description of Artificial Sequence: Synthetic peptide
EVNEFACVVADAVIKTLQPVSELLT

SEQ ID NO: 14590 - protein, 25 aa, synthetic construct
  REGION 1..25: note = Description of Artificial Sequence: Synthetic peptide
EEAARYMRSLKVPATVSVSSPDAVT

SEQ ID NO: 14591 - protein, 25 aa, synthetic construct
  REGION 1..25: note = Description of Artificial Sequence: Synthetic peptide
EVEKGVLPQLEQPYVFIKRSDARTA

SEQ ID NO: 14592 - protein, 25 aa, synthetic construct
  REGION 1..25: note = Description of Artificial Sequence: Synthetic peptide
KKDWYDFVENPDILRVYANLGERVR

SEQ ID NO: 14593 - protein, 25 aa, synthetic construct
  REGION 1..25: note = Description of Artificial Sequence: Synthetic peptide
KIQEGVVDYGARFYFYTSKTTVASL

SEQ ID NO: 14594 - protein, 25 aa, synthetic construct
  REGION 1..25: note = Description of Artificial Sequence: Synthetic peptide
IKIQEGVVDYGARFYFYTSKTTVAS

SEQ ID NO: 14595 - protein, 25 aa, synthetic construct
  REGION 1..25: note = Description of Artificial Sequence: Synthetic peptide
GIKIQEGVVDYGARFYFYTSKTTVA

SEQ ID NO: 14596 - protein, 25 aa, synthetic construct
  REGION 1..25: note = Description of Artificial Sequence: Synthetic peptide
ELKFNPPALQDAYYRARAGEAANFC

SEQ ID NO: 14597 - protein, 25 aa, synthetic construct
  REGION 1..25: note = Description of Artificial Sequence: Synthetic peptide
NGTHWFVTQRNFYEPQIITTDNTFV

SEQ ID NO: 14598 - protein, 25 aa, synthetic construct
  REGION 1..25: note = Description of Artificial Sequence: Synthetic peptide
AIDYKHYTPSFKKGAKLLHKPIVWH

SEQ ID NO: 14599 - protein, 25 aa, synthetic construct
  REGION 1..25: note = Description of Artificial Sequence: Synthetic peptide
IDYKHYTPSFKKGAKLLHKPIVWHV

SEQ ID NO: 14600 - protein, 25 aa, synthetic construct
  REGION 1..25: note = Description of Artificial Sequence: Synthetic peptide
DYKHYTPSFKKGAKLLHKPIVWHVN

SEQ ID NO: 14601 - protein, 25 aa, synthetic construct
  REGION 1..25: note = Description of Artificial Sequence: Synthetic peptide
VAIDYKHYTPSFKKGAKLLHKPIVW

SEQ ID NO: 14602 - protein, 25 aa, synthetic construct
  REGION 1..25: note = Description of Artificial Sequence: Synthetic peptide
GVFVSNGTHWFVTQRNFYEPQIITT

SEQ ID NO: 14603 - protein, 25 aa, synthetic construct
  REGION 1..25: note = Description of Artificial Sequence: Synthetic peptide
VFVSNGTHWFVTQRNFYEPQIITTD

SEQ ID NO: 14604 - protein, 25 aa, synthetic construct
  REGION 1..25: note = Description of Artificial Sequence: Synthetic peptide
IETISLAGSYKDWSYSGQSTQLGIE

SEQ ID NO: 14605 - protein, 25 aa, synthetic construct
  REGION 1..25: note = Description of Artificial Sequence: Synthetic peptide
ETISLAGSYKDWSYSGQSTQLGIEF

SEQ ID NO: 14606 - protein, 25 aa, synthetic construct
  REGION 1..25: note = Description of Artificial Sequence: Synthetic peptide
FGGCVFSYVGCHNKCAYWVPRASAN

SEQ ID NO: 14607 - protein, 25 aa, synthetic construct
  REGION 1..25: note = Description of Artificial Sequence: Synthetic peptide
GGCVFSYVGCHNKCAYWVPRASANI

SEQ ID NO: 14608 - protein, 25 aa, synthetic construct
  REGION 1..25: note = Description of Artificial Sequence: Synthetic peptide
FSYVGCHNKCAYWVPRASANIGCNH

SEQ ID NO: 14609 - protein, 25 aa, synthetic construct
  REGION 1..25: note = Description of Artificial Sequence: Synthetic peptide
GCVFSYVGCHNKCAYWVPRASANIG

SEQ ID NO: 14610 - protein, 25 aa, synthetic construct
  REGION 1..25: note = Description of Artificial Sequence: Synthetic peptide
CVFSYVGCHNKCAYWVPRASANIGC

SEQ ID NO: 14611 - protein, 25 aa, synthetic construct
  REGION 1..25: note = Description of Artificial Sequence: Synthetic peptide
SYVGCHNKCAYWVPRASANIGCNHT

SEQ ID NO: 14612 - protein, 25 aa, synthetic construct
  REGION 1..25: note = Description of Artificial Sequence: Synthetic peptide
VFSYVGCHNKCAYWVPRASANIGCN

SEQ ID NO: 14613 - protein, 25 aa, synthetic construct
  REGION 1..25: note = Description of Artificial Sequence: Synthetic peptide
GICASYQTQTNSPRRARSVASQSII

SEQ ID NO: 14614 - protein, 25 aa, synthetic construct
  REGION 1..25: note = Description of Artificial Sequence: Synthetic peptide
ICASYQTQTNSPRRARSVASQSIIA

SEQ ID NO: 14615 - protein, 25 aa, synthetic construct
  REGION 1..25: note = Description of Artificial Sequence: Synthetic peptide
LVRGFGDSVEEVLSEARQHLKDGTC

SEQ ID NO: 14616 - protein, 25 aa, synthetic construct
  REGION 1..25: note = Description of Artificial Sequence: Synthetic peptide
VRGFGDSVEEVLSEARQHLKDGTCG

SEQ ID NO: 14617 - protein, 25 aa, synthetic construct
  REGION 1..25: note = Description of Artificial Sequence: Synthetic peptide
ATRVECTTIVNGVRRSFYVYANGGK

SEQ ID NO: 14618 - protein, 25 aa, synthetic construct
  REGION 1..25: note = Description of Artificial Sequence: Synthetic peptide
TRVECTTIVNGVRRSFYVYANGGKG

SEQ ID NO: 14619 - protein, 25 aa, synthetic construct
  REGION 1..25: note = Description of Artificial Sequence: Synthetic peptide
VECTTIVNGVRRSFYVYANGGKGFC

SEQ ID NO: 14620 - protein, 25 aa, synthetic construct
  REGION 1..25: note = Description of Artificial Sequence: Synthetic peptide
RVECTTIVNGVRRSFYVYANGGKGF

SEQ ID NO: 14621 - protein, 25 aa, synthetic construct
  REGION 1..25: note = Description of Artificial Sequence: Synthetic peptide
RATRVECTTIVNGVRRSFYVYANGG

SEQ ID NO: 14622 - protein, 25 aa, synthetic construct
  REGION 1..25: note = Description of Artificial Sequence: Synthetic peptide
NRYLALYNKYKYFSGAMDTTSYREA

SEQ ID NO: 14623 - protein, 25 aa, synthetic construct
  REGION 1..25: note = Description of Artificial Sequence: Synthetic peptide
RYLALYNKYKYFSGAMDTTSYREAA

SEQ ID NO: 14624 - protein, 25 aa, synthetic construct
  REGION 1..25: note = Description of Artificial Sequence: Synthetic peptide
FRRAFGEYSHVVAFNTLLFLMSFTV

SEQ ID NO: 14625 - protein, 25 aa, synthetic construct
  REGION 1..25: note = Description of Artificial Sequence: Synthetic peptide
RAFGEYSHVVAFNTLLFLMSFTVLC

SEQ ID NO: 14626 - protein, 25 aa, synthetic construct
  REGION 1..25: note = Description of Artificial Sequence: Synthetic peptide
AFGEYSHVVAFNTLLFLMSFTVLCL

SEQ ID NO: 14627 - protein, 25 aa, synthetic construct
  REGION 1..25: note = Description of Artificial Sequence: Synthetic peptide
RRAFGEYSHVVAFNTLLFLMSFTVL

SEQ ID NO: 14628 - protein, 25 aa, synthetic construct
  REGION 1..25: note = Description of Artificial Sequence: Synthetic peptide
RFRRAFGEYSHVVAFNTLLFLMSFT

SEQ ID NO: 14629 - protein, 25 aa, synthetic construct
  REGION 1..25: note = Description of Artificial Sequence: Synthetic peptide
TILDGISQYSLRLIDAMMFTSDLAT

SEQ ID NO: 14630 - protein, 25 aa, synthetic construct
  REGION 1..25: note = Description of Artificial Sequence: Synthetic peptide
ILDGISQYSLRLIDAMMFTSDLATN

SEQ ID NO: 14631 - protein, 25 aa, synthetic construct
  REGION 1..25: note = Description of Artificial Sequence: Synthetic peptide
SRIKASMPTTIAKNTVKSVGKFCLE

SEQ ID NO: 14632 - protein, 25 aa, synthetic construct
  REGION 1..25: note = Description of Artificial Sequence: Synthetic peptide
SVLQQLRVESSSKLWAQCVQLHNDI

SEQ ID NO: 14633 - protein, 25 aa, synthetic construct
  REGION 1..25: note = Description of Artificial Sequence: Synthetic peptide
SEFDRDAAMQRKLEKMADQAMTQMY

SEQ ID NO: 14634 - protein, 25 aa, synthetic construct
  REGION 1..25: note = Description of Artificial Sequence: Synthetic peptide
KSEFDRDAAMQRKLEKMADQAMTQM

SEQ ID NO: 14635 - protein, 25 aa, synthetic construct
  REGION 1..25: note = Description of Artificial Sequence: Synthetic peptide
AKSEFDRDAAMQRKLEKMADQAMTQ

SEQ ID NO: 14636 - protein, 25 aa, synthetic construct
  REGION 1..25: note = Description of Artificial Sequence: Synthetic peptide
VAKSEFDRDAAMQRKLEKMADQAMT

SEQ ID NO: 14637 - protein, 25 aa, synthetic construct
  REGION 1..25: note = Description of Artificial Sequence: Synthetic peptide
RQCSGVTFQSAVKRTIKGTHHWLLL

SEQ ID NO: 14638 - protein, 25 aa, synthetic construct
  REGION 1..25: note = Description of Artificial Sequence: Synthetic peptide
HINAQVAKSHNIALIWNVKDFMSLS

SEQ ID NO: 14639 - protein, 25 aa, synthetic construct
  REGION 1..25: note = Description of Artificial Sequence: Synthetic peptide
RHINAQVAKSHNIALIWNVKDFMSL

SEQ ID NO: 14640 - protein, 25 aa, synthetic construct
  REGION 1..25: note = Description of Artificial Sequence: Synthetic peptide
MTARTVYDDGARRVWTLMNVLTLVY

SEQ ID NO: 14641 - protein, 25 aa, synthetic construct
  REGION 1..25: note = Description of Artificial Sequence: Synthetic peptide
GDCLGDIAARDLICAQKFNGLTVLP

SEQ ID NO: 14642 - protein, 25 aa, synthetic construct
  REGION 1..25: note = Description of Artificial Sequence: Synthetic peptide
MMSAPPAQYELKHGTFTCASEYTGN

SEQ ID NO: 14643 - protein, 25 aa, synthetic construct
  REGION 1..25: note = Description of Artificial Sequence: Synthetic peptide
PAQYELKHGTFTCASEYTGNYQCGH

SEQ ID NO: 14644 - protein, 25 aa, synthetic construct
  REGION 1..25: note = Description of Artificial Sequence: Synthetic peptide
MSAPPAQYELKHGTFTCASEYTGNY

SEQ ID NO: 14645 - protein, 25 aa, synthetic construct
  REGION 1..25: note = Description of Artificial Sequence: Synthetic peptide
APPAQYELKHGTFTCASEYTGNYQC

SEQ ID NO: 14646 - protein, 25 aa, synthetic construct
  REGION 1..25: note = Description of Artificial Sequence: Synthetic peptide
SAPPAQYELKHGTFTCASEYTGNYQ

SEQ ID NO: 14647 - protein, 25 aa, synthetic construct
  REGION 1..25: note = Description of Artificial Sequence: Synthetic peptide
AQYELKHGTFTCASEYTGNYQCGHY

SEQ ID NO: 14648 - protein, 25 aa, synthetic construct
  REGION 1..25: note = Description of Artificial Sequence: Synthetic peptide
PPAQYELKHGTFTCASEYTGNYQCG

SEQ ID NO: 14649 - protein, 25 aa, synthetic construct
  REGION 1..25: note = Description of Artificial Sequence: Synthetic peptide
LARKHTTCCSLSHRFYRLANECAQV

SEQ ID NO: 14650 - protein, 25 aa, synthetic construct
  REGION 1..25: note = Description of Artificial Sequence: Synthetic peptide
QPITNCVKMLCTHTGTGQAITVTPE

SEQ ID NO: 14651 - protein, 25 aa, synthetic construct
  REGION 1..25: note = Description of Artificial Sequence: Synthetic peptide
PITNCVKMLCTHTGTGQAITVTPEA

SEQ ID NO: 14652 - protein, 25 aa, synthetic construct
  REGION 1..25: note = Description of Artificial Sequence: Synthetic peptide
ITNCVKMLCTHTGTGQAITVTPEAN

SEQ ID NO: 14653 - protein, 25 aa, synthetic construct
  REGION 1..25: note = Description of Artificial Sequence: Synthetic peptide
NWNTKHSSGVTRELMRELNGGAYTR

SEQ ID NO: 14654 - protein, 25 aa, synthetic construct
  REGION 1..25: note = Description of Artificial Sequence: Synthetic peptide
VTTTLEETKFLTENLLLYIDINGNL

SEQ ID NO: 14655 - protein, 25 aa, synthetic construct
  REGION 1..25: note = Description of Artificial Sequence: Synthetic peptide
EVTTTLEETKFLTENLLLYIDINGN

SEQ ID NO: 14656 - protein, 25 aa, synthetic construct
  REGION 1..25: note = Description of Artificial Sequence: Synthetic peptide
EEKFKEGVEFLRDGWEIVKFISTCA

SEQ ID NO: 14657 - protein, 25 aa, synthetic construct
  REGION 1..25: note = Description of Artificial Sequence: Synthetic peptide
LEEKFKEGVEFLRDGWEIVKFISTC

SEQ ID NO: 14658 - protein, 25 aa, synthetic construct
  REGION 1..25: note = Description of Artificial Sequence: Synthetic peptide
WLEEKFKEGVEFLRDGWEIVKFIST

SEQ ID NO: 14659 - protein, 25 aa, synthetic construct
  REGION 1..25: note = Description of Artificial Sequence: Synthetic peptide
FLQSINFVRIIMRLWLCWKCRSKNP

SEQ ID NO: 14660 - protein, 25 aa, synthetic construct
  REGION 1..25: note = Description of Artificial Sequence: Synthetic peptide
LQSINFVRIIMRLWLCWKCRSKNPL

SEQ ID NO: 14661 - protein, 25 aa, synthetic construct
  REGION 1..25: note = Description of Artificial Sequence: Synthetic peptide
GVTRDIASTDTCFANKHADFDTWFS

SEQ ID NO: 14662 - protein, 25 aa, synthetic construct
  REGION 1..25: note = Description of Artificial Sequence: Synthetic peptide
VTRDIASTDTCFANKHADFDTWFSQ

SEQ ID NO: 14663 - protein, 25 aa, synthetic construct
  REGION 1..25: note = Description of Artificial Sequence: Synthetic peptide
HWFVTQRNFYEPQIITTDNTFVSGN

SEQ ID NO: 14664 - protein, 25 aa, synthetic construct
  REGION 1..25: note = Description of Artificial Sequence: Synthetic peptide
EDEFTPFDVVRQCSGVTFQSAVKRT

SEQ ID NO: 14665 - protein, 25 aa, synthetic construct
  REGION 1..25: note = Description of Artificial Sequence: Synthetic peptide
AIDGGVTRDIASTDTCFANKHADFD

SEQ ID NO: 14666 - protein, 25 aa, synthetic construct
  REGION 1..25: note = Description of Artificial Sequence: Synthetic peptide
YKAIDGGVTRDIASTDTCFANKHAD

SEQ ID NO: 14667 - protein, 25 aa, synthetic construct
  REGION 1..25: note = Description of Artificial Sequence: Synthetic peptide
GYKAIDGGVTRDIASTDTCFANKHA

SEQ ID NO: 14668 - protein, 25 aa, synthetic construct
  REGION 1..25: note = Description of Artificial Sequence: Synthetic peptide
IDGGVTRDIASTDTCFANKHADFDT

SEQ ID NO: 14669 - protein, 25 aa, synthetic construct
  REGION 1..25: note = Description of Artificial Sequence: Synthetic peptide
KAIDGGVTRDIASTDTCFANKHADF

SEQ ID NO: 14670 - protein, 25 aa, synthetic construct
  REGION 1..25: note = Description of Artificial Sequence: Synthetic peptide
DGGVTRDIASTDTCFANKHADFDTW

SEQ ID NO: 14671 - protein, 25 aa, synthetic construct
  REGION 1..25: note = Description of Artificial Sequence: Synthetic peptide
VYFLQSINFVRIIMRLWLCWKCRSK

SEQ ID NO: 14672 - protein, 25 aa, synthetic construct
  REGION 1..25: note = Description of Artificial Sequence: Synthetic peptide
MTWLDMVDTSLSGFKLKDCVMYASA

SEQ ID NO: 14673 - protein, 25 aa, synthetic construct
  REGION 1..25: note = Description of Artificial Sequence: Synthetic peptide
IQQVVDADSKIVQLSEISMDNSPNL

SEQ ID NO: 14674 - protein, 25 aa, synthetic construct
  REGION 1..25: note = Description of Artificial Sequence: Synthetic peptide
EIQQVVDADSKIVQLSEISMDNSPN

SEQ ID NO: 14675 - protein, 25 aa, synthetic construct
  REGION 1..25: note = Description of Artificial Sequence: Synthetic peptide
TAVVIPTKKAGGTTEMLAKALRKVP

SEQ ID NO: 14676 - protein, 25 aa, synthetic construct
  REGION 1..25: note = Description of Artificial Sequence: Synthetic peptide
VETKAIVSTIQRKYKGIKIQEGVVD

SEQ ID NO: 14677 - protein, 25 aa, synthetic construct
  REGION 1..25: note = Description of Artificial Sequence: Synthetic peptide
ETKAIVSTIQRKYKGIKIQEGVVDY

SEQ ID NO: 14678 - protein, 25 aa, synthetic construct
  REGION 1..25: note = Description of Artificial Sequence: Synthetic peptide
EQKIAEIPKEEVKPFITESKPSVEQ

SEQ ID NO: 14679 - protein, 25 aa, synthetic construct
  REGION 1..25: note = Description of Artificial Sequence: Synthetic peptide
TFQSAVKRTIKGTHHWLLLTILTSL

SEQ ID NO: 14680 - protein, 25 aa, synthetic construct
  REGION 1..25: note = Description of Artificial Sequence: Synthetic peptide
QSAVKRTIKGTHHWLLLTILTSLLV

SEQ ID NO: 14681 - protein, 25 aa, synthetic construct
  REGION 1..25: note = Description of Artificial Sequence: Synthetic peptide
FQSAVKRTIKGTHHWLLLTILTSLL

SEQ ID NO: 14682 - protein, 25 aa, synthetic construct
  REGION 1..25: note = Description of Artificial Sequence: Synthetic peptide
VTFQSAVKRTIKGTHHWLLLTILTS

SEQ ID NO: 14683 - protein, 25 aa, synthetic construct
  REGION 1..25: note = Description of Artificial Sequence: Synthetic peptide
GSALLEDEFTPFDVVRQCSGVTFQS

SEQ ID NO: 14684 - protein, 25 aa, synthetic construct
  REGION 1..25: note = Description of Artificial Sequence: Synthetic peptide
MDTTSYREAACCHLAKALNDFSNSG

SEQ ID NO: 14685 - protein, 25 aa, synthetic construct
  REGION 1..25: note = Description of Artificial Sequence: Synthetic peptide
AMDTTSYREAACCHLAKALNDFSNS

SEQ ID NO: 14686 - protein, 25 aa, synthetic construct
  REGION 1..25: note = Description of Artificial Sequence: Synthetic peptide
HGGGVAGALNKATNNAMQVESDDYI

SEQ ID NO: 14687 - protein, 25 aa, synthetic construct
  REGION 1..25: note = Description of Artificial Sequence: Synthetic peptide
GGGVAGALNKATNNAMQVESDDYIA

SEQ ID NO: 14688 - protein, 25 aa, synthetic construct
  REGION 1..25: note = Description of Artificial Sequence: Synthetic peptide
YLKHGGGVAGALNKATNNAMQVESD

SEQ ID NO: 14689 - protein, 25 aa, synthetic construct
  REGION 1..25: note = Description of Artificial Sequence: Synthetic peptide
GVAGALNKATNNAMQVESDDYIATN

SEQ ID NO: 14690 - protein, 25 aa, synthetic construct
  REGION 1..25: note = Description of Artificial Sequence: Synthetic peptide
VAGALNKATNNAMQVESDDYIATNG

SEQ ID NO: 14691 - protein, 25 aa, synthetic construct
  REGION 1..25: note = Description of Artificial Sequence: Synthetic peptide
LKHGGGVAGALNKATNNAMQVESDD

SEQ ID NO: 14692 - protein, 25 aa, synthetic construct
  REGION 1..25: note = Description of Artificial Sequence: Synthetic peptide
KHGGGVAGALNKATNNAMQVESDDY

SEQ ID NO: 14693 - protein, 25 aa, synthetic construct
  REGION 1..25: note = Description of Artificial Sequence: Synthetic peptide
GGVAGALNKATNNAMQVESDDYIAT

SEQ ID NO: 14694 - protein, 25 aa, synthetic construct
  REGION 1..25: note = Description of Artificial Sequence: Synthetic peptide
HTKKWKYPQVNGLTSIKWADNNCYL

SEQ ID NO: 14695 - protein, 25 aa, synthetic construct
  REGION 1..25: note = Description of Artificial Sequence: Synthetic peptide
KSEKQVEQKIAEIPKEEVKPFITES

SEQ ID NO: 14696 - protein, 25 aa, synthetic construct
  REGION 1..25: note = Description of Artificial Sequence: Synthetic peptide
MKSEKQVEQKIAEIPKEEVKPFITE

SEQ ID NO: 14697 - protein, 25 aa, synthetic construct
  REGION 1..25: note = Description of Artificial Sequence: Synthetic peptide
EMKSEKQVEQKIAEIPKEEVKPFIT

SEQ ID NO: 14698 - protein, 25 aa, synthetic construct
  REGION 1..25: note = Description of Artificial Sequence: Synthetic peptide
SEKQVEQKIAEIPKEEVKPFITESK

SEQ ID NO: 14699 - protein, 25 aa, synthetic construct
  REGION 1..25: note = Description of Artificial Sequence: Synthetic peptide
EKQVEQKIAEIPKEEVKPFITESKP

SEQ ID NO: 14700 - protein, 25 aa, synthetic construct
  REGION 1..25: note = Description of Artificial Sequence: Synthetic peptide
SFLEMKSEKQVEQKIAEIPKEEVKP

SEQ ID NO: 14701 - protein, 25 aa, synthetic construct
  REGION 1..25: note = Description of Artificial Sequence: Synthetic peptide
FLEMKSEKQVEQKIAEIPKEEVKPF

SEQ ID NO: 14702 - protein, 25 aa, synthetic construct
  REGION 1..25: note = Description of Artificial Sequence: Synthetic peptide
LEMKSEKQVEQKIAEIPKEEVKPFI

SEQ ID NO: 14703 - protein, 25 aa, synthetic construct
  REGION 1..25: note = Description of Artificial Sequence: Synthetic peptide
IGGAKLKALNLGETFVTHSKGLYRK

SEQ ID NO: 14704 - protein, 25 aa, synthetic construct
  REGION 1..25: note = Description of Artificial Sequence: Synthetic peptide
DSAEVAVKMFDAYVNTFSSTFNVPM

SEQ ID NO: 14705 - protein, 25 aa, synthetic construct
  REGION 1..25: note = Description of Artificial Sequence: Synthetic peptide
VGDSAEVAVKMFDAYVNTFSSTFNV

SEQ ID NO: 14706 - protein, 25 aa, synthetic construct
  REGION 1..25: note = Description of Artificial Sequence: Synthetic peptide
GDSAEVAVKMFDAYVNTFSSTFNVP

SEQ ID NO: 14707 - protein, 25 aa, synthetic construct
  REGION 1..25: note = Description of Artificial Sequence: Synthetic peptide
KGLYRKCVKSREETGLLMPLKAPKE

SEQ ID NO: 14708 - protein, 25 aa, synthetic construct
  REGION 1..25: note = Description of Artificial Sequence: Synthetic peptide
PSYAAFATAQEAYEQAVANGDSEVV

SEQ ID NO: 14709 - protein, 25 aa, synthetic construct
  REGION 1..25: note = Description of Artificial Sequence: Synthetic peptide
SKGLYRKCVKSREETGLLMPLKAPK

SEQ ID NO: 14710 - protein, 25 aa, synthetic construct
  REGION 1..25: note = Description of Artificial Sequence: Synthetic peptide
LGPLSAQTGIAVLDMCASLKELLQN

SEQ ID NO: 14711 - protein, 25 aa, synthetic construct
  REGION 1..25: note = Description of Artificial Sequence: Synthetic peptide
KKWKYPQVNGLTSIKWADNNCYLAT

SEQ ID NO: 14712 - protein, 25 aa, synthetic construct
  REGION 1..25: note = Description of Artificial Sequence: Synthetic peptide
TKKWKYPQVNGLTSIKWADNNCYLA

SEQ ID NO: 14713 - protein, 25 aa, synthetic construct
  REGION 1..25: note = Description of Artificial Sequence: Synthetic peptide
KWKYPQVNGLTSIKWADNNCYLATA

SEQ ID NO: 14714 - protein, 25 aa, synthetic construct
  REGION 1..25: note = Description of Artificial Sequence: Synthetic peptide
YPQVNGLTSIKWADNNCYLATALLT

SEQ ID NO: 14715 - protein, 25 aa, synthetic construct
  REGION 1..25: note = Description of Artificial Sequence: Synthetic peptide
WKYPQVNGLTSIKWADNNCYLATAL

SEQ ID NO: 14716 - protein, 25 aa, synthetic construct
  REGION 1..25: note = Description of Artificial Sequence: Synthetic peptide
KYPQVNGLTSIKWADNNCYLATALL

SEQ ID NO: 14717 - protein, 25 aa, synthetic construct
  REGION 1..25: note = Description of Artificial Sequence: Synthetic peptide
VCINGLMLLEIKDTEKYCALAPNMM

SEQ ID NO: 14718 - protein, 25 aa, synthetic construct
  REGION 1..25: note = Description of Artificial Sequence: Synthetic peptide
PVCINGLMLLEIKDTEKYCALAPNM

SEQ ID NO: 14719 - protein, 25 aa, synthetic construct
  REGION 1..25: note = Description of Artificial Sequence: Synthetic peptide
CINGLMLLEIKDTEKYCALAPNMMV

SEQ ID NO: 14720 - protein, 25 aa, synthetic construct
  REGION 1..25: note = Description of Artificial Sequence: Synthetic peptide
NEKQEILGTVSWNLREMLAHAEETR

SEQ ID NO: 14721 - protein, 25 aa, synthetic construct
  REGION 1..25: note = Description of Artificial Sequence: Synthetic peptide
SNEKQEILGTVSWNLREMLAHAEET

SEQ ID NO: 14722 - protein, 25 aa, synthetic construct
  REGION 1..25: note = Description of Artificial Sequence: Synthetic peptide
YLKLRSDVLLPLTQYNRYLALYNKY

SEQ ID NO: 14723 - protein, 25 aa, synthetic construct
  REGION 1..25: note = Description of Artificial Sequence: Synthetic peptide
EMYLKLRSDVLLPLTQYNRYLALYN

SEQ ID NO: 14724 - protein, 25 aa, synthetic construct
  REGION 1..25: note = Description of Artificial Sequence: Synthetic peptide
MYLKLRSDVLLPLTQYNRYLALYNK

SEQ ID NO: 14725 - protein, 25 aa, synthetic construct
  REGION 1..25: note = Description of Artificial Sequence: Synthetic peptide
AAFATAQEAYEQAVANGDSEVVLKK

SEQ ID NO: 14726 - protein, 25 aa, synthetic construct
  REGION 1..25: note = Description of Artificial Sequence: Synthetic peptide
AFATAQEAYEQAVANGDSEVVLKKL

SEQ ID NO: 14727 - protein, 25 aa, synthetic construct
  REGION 1..25: note = Description of Artificial Sequence: Synthetic peptide
YAAFATAQEAYEQAVANGDSEVVLK

SEQ ID NO: 14728 - protein, 25 aa, synthetic construct
  REGION 1..25: note = Description of Artificial Sequence: Synthetic peptide
GARRVWTLMNVLTLVYKVYYGNALD

SEQ ID NO: 14729 - protein, 25 aa, synthetic construct
  REGION 1..25: note = Description of Artificial Sequence: Synthetic peptide
DTKRGVYCCREHEHEIAWYTERSEK

SEQ ID NO: 14730 - protein, 25 aa, synthetic construct
  REGION 1..25: note = Description of Artificial Sequence: Synthetic peptide
ESGEFKLASHMYCSFYPPDEDEEEG

SEQ ID NO: 14731 - protein, 25 aa, synthetic construct
  REGION 1..25: note = Description of Artificial Sequence: Synthetic peptide
DESGEFKLASHMYCSFYPPDEDEEE

SEQ ID NO: 14732 - protein, 25 aa, synthetic construct
  REGION 1..25: note = Description of Artificial Sequence: Synthetic peptide
TAQEAYEQAVANGDSEVVLKKLKKS

SEQ ID NO: 14733 - protein, 25 aa, synthetic construct
  REGION 1..25: note = Description of Artificial Sequence: Synthetic peptide
SSSKLWAQCVQLHNDILLAKDTTEA

SEQ ID NO: 14734 - protein, 25 aa, synthetic construct
  REGION 1..25: note = Description of Artificial Sequence: Synthetic peptide
IICISTKHFYWFFSNYLKRRVVFNG

SEQ ID NO: 14735 - protein, 25 aa, synthetic construct
  REGION 1..25: note = Description of Artificial Sequence: Synthetic peptide
TCANDPVGFTLKNTVCTVCGMWKGY

SEQ ID NO: 14736 - protein, 25 aa, synthetic construct
  REGION 1..25: note = Description of Artificial Sequence: Synthetic peptide
IPTTCANDPVGFTLKNTVCTVCGMW

SEQ ID NO: 14737 - protein, 25 aa, synthetic construct
  REGION 1..25: note = Description of Artificial Sequence: Synthetic peptide
TTCANDPVGFTLKNTVCTVCGMWKG

SEQ ID NO: 14738 - protein, 25 aa, synthetic construct
  REGION 1..25: note = Description of Artificial Sequence: Synthetic peptide
PTTCANDPVGFTLKNTVCTVCGMWK

SEQ ID NO: 14739 - protein, 25 aa, synthetic construct
  REGION 1..25: note = Description of Artificial Sequence: Synthetic peptide
QIPTTCANDPVGFTLKNTVCTVCGM

SEQ ID NO: 14740 - protein, 25 aa, synthetic construct
  REGION 1..25: note = Description of Artificial Sequence: Synthetic peptide
VQIPTTCANDPVGFTLKNTVCTVCG

SEQ ID NO: 14741 - protein, 25 aa, synthetic construct
  REGION 1..25: note = Description of Artificial Sequence: Synthetic peptide
FIETISLAGSYKDWSYSGQSTQLGI

SEQ ID NO: 14742 - protein, 25 aa, synthetic construct
  REGION 1..25: note = Description of Artificial Sequence: Synthetic peptide
LPTEVLTEEVVLKTGDLQPLEQPTS

SEQ ID NO: 14743 - protein, 25 aa, synthetic construct
  REGION 1..25: note = Description of Artificial Sequence: Synthetic peptide
GLDYKAFKQIVESCGNFKVTKGKAK

SEQ ID NO: 14744 - protein, 25 aa, synthetic construct
  REGION 1..25: note = Description of Artificial Sequence: Synthetic peptide
LDYKAFKQIVESCGNFKVTKGKAKK

SEQ ID NO: 14745 - protein, 25 aa, synthetic construct
  REGION 1..25: note = Description of Artificial Sequence: Synthetic peptide
PFLNKVVSTTTNIVTRCLNRVCTNY

SEQ ID NO: 14746 - protein, 25 aa, synthetic construct
  REGION 1..25: note = Description of Artificial Sequence: Synthetic peptide
KCAYWVPRASANIGCNHTGVVGEGS

SEQ ID NO: 14747 - protein, 25 aa, synthetic construct
  REGION 1..25: note = Description of Artificial Sequence: Synthetic peptide
CAYWVPRASANIGCNHTGVVGEGSE

SEQ ID NO: 14748 - protein, 25 aa, synthetic construct
  REGION 1..25: note = Description of Artificial Sequence: Synthetic peptide
SGSDVLYQPPQTSITSAVLQSGFRK

SEQ ID NO: 14749 - protein, 25 aa, synthetic construct
  REGION 1..25: note = Description of Artificial Sequence: Synthetic peptide
GSDVLYQPPQTSITSAVLQSGFRKM

SEQ ID NO: 14750 - protein, 25 aa, synthetic construct
  REGION 1..25: note = Description of Artificial Sequence: Synthetic peptide
ALEPLVDLPIGINITRFQTLLALHR

SEQ ID NO: 14751 - protein, 25 aa, synthetic construct
  REGION 1..25: note = Description of Artificial Sequence: Synthetic peptide
LEPLVDLPIGINITRFQTLLALHRS

SEQ ID NO: 14752 - protein, 25 aa, synthetic construct
  REGION 1..25: note = Description of Artificial Sequence: Synthetic peptide
NNCTFEYVSQPFLMDLEGKQGNFKN

SEQ ID NO: 14753 - protein, 25 aa, synthetic construct
  REGION 1..25: note = Description of Artificial Sequence: Synthetic peptide
LPAPRTLLTKGTLEPEYFNSVCRLM

SEQ ID NO: 14754 - protein, 25 aa, synthetic construct
  REGION 1..25: note = Description of Artificial Sequence: Synthetic peptide
RTLLTKGTLEPEYFNSVCRLMKTIG

SEQ ID NO: 14755 - protein, 25 aa, synthetic construct
  REGION 1..25: note = Description of Artificial Sequence: Synthetic peptide
PAPRTLLTKGTLEPEYFNSVCRLMK

SEQ ID NO: 14756 - protein, 25 aa, synthetic construct
  REGION 1..25: note = Description of Artificial Sequence: Synthetic peptide
APRTLLTKGTLEPEYFNSVCRLMKT

SEQ ID NO: 14757 - protein, 25 aa, synthetic construct
  REGION 1..25: note = Description of Artificial Sequence: Synthetic peptide
CLDDRCILHCANFNVLFSTVFPPTS

SEQ ID NO: 14758 - protein, 25 aa, synthetic construct
  REGION 1..25: note = Description of Artificial Sequence: Synthetic peptide
NCVNCLDDRCILHCANFNVLFSTVF

SEQ ID NO: 14759 - protein, 25 aa, synthetic construct
  REGION 1..25: note = Description of Artificial Sequence: Synthetic peptide
CVNCLDDRCILHCANFNVLFSTVFP

SEQ ID NO: 14760 - protein, 25 aa, synthetic construct
  REGION 1..25: note = Description of Artificial Sequence: Synthetic peptide
NCLDDRCILHCANFNVLFSTVFPPT

SEQ ID NO: 14761 - protein, 25 aa, synthetic construct
  REGION 1..25: note = Description of Artificial Sequence: Synthetic peptide
VNCLDDRCILHCANFNVLFSTVFPP

SEQ ID NO: 14762 - protein, 25 aa, synthetic construct
  REGION 1..25: note = Description of Artificial Sequence: Synthetic peptide
FLYLYALVYFLQSINFVRIIMRLWL

SEQ ID NO: 14763 - protein, 25 aa, synthetic construct
  REGION 1..25: note = Description of Artificial Sequence: Synthetic peptide
PFLYLYALVYFLQSINFVRIIMRLW

SEQ ID NO: 14764 - protein, 25 aa, synthetic construct
  REGION 1..25: note = Description of Artificial Sequence: Synthetic peptide
NRDVDTDFVNEFYAYLRKHFSMMIL

SEQ ID NO: 14765 - protein, 25 aa, synthetic construct
  REGION 1..25: note = Description of Artificial Sequence: Synthetic peptide
LYLYALVYFLQSINFVRIIMRLWLC

SEQ ID NO: 14766 - protein, 25 aa, synthetic construct
  REGION 1..25: note = Description of Artificial Sequence: Synthetic peptide
AGCFVDDIVKTDGTLMIERFVSLAI

SEQ ID NO: 14767 - protein, 25 aa, synthetic construct
  REGION 1..25: note = Description of Artificial Sequence: Synthetic peptide
GAGCFVDDIVKTDGTLMIERFVSLA

SEQ ID NO: 14768 - protein, 25 aa, synthetic construct
  REGION 1..25: note = Description of Artificial Sequence: Synthetic peptide
LKSFTVEKGIYQTSNFRVQPTESIV

SEQ ID NO: 14769 - protein, 25 aa, synthetic construct
  REGION 1..25: note = Description of Artificial Sequence: Synthetic peptide
TLKSFTVEKGIYQTSNFRVQPTESI

SEQ ID NO: 14770 - protein, 25 aa, synthetic construct
  REGION 1..25: note = Description of Artificial Sequence: Synthetic peptide
AEIRASANLAATKMSECVLGQSKRV

SEQ ID NO: 14771 - protein, 25 aa, synthetic construct
  REGION 1..25: note = Description of Artificial Sequence: Synthetic peptide
AAEIRASANLAATKMSECVLGQSKR

SEQ ID NO: 14772 - protein, 25 aa, synthetic construct
  REGION 1..25: note = Description of Artificial Sequence: Synthetic peptide
YGGWHNMLKTVYSDVENPHLMGWDY

SEQ ID NO: 14773 - protein, 25 aa, synthetic construct
  REGION 1..25: note = Description of Artificial Sequence: Synthetic peptide
KFYGGWHNMLKTVYSDVENPHLMGW

SEQ ID NO: 14774 - protein, 25 aa, synthetic construct
  REGION 1..25: note = Description of Artificial Sequence: Synthetic peptide
FYGGWHNMLKTVYSDVENPHLMGWD

SEQ ID NO: 14775 - protein, 25 aa, synthetic construct
  REGION 1..25: note = Description of Artificial Sequence: Synthetic peptide
GGWHNMLKTVYSDVENPHLMGWDYP

SEQ ID NO: 14776 - protein, 25 aa, synthetic construct
  REGION 1..25: note = Description of Artificial Sequence: Synthetic peptide
SKFYGGWHNMLKTVYSDVENPHLMG

SEQ ID NO: 14777 - protein, 25 aa, synthetic construct
  REGION 1..25: note = Description of Artificial Sequence: Synthetic peptide
FTRGVYYPDKVFRSSVLHSTQDLFL

SEQ ID NO: 14778 - protein, 25 aa, synthetic construct
  REGION 1..25: note = Description of Artificial Sequence: Synthetic peptide
SFTRGVYYPDKVFRSSVLHSTQDLF

SEQ ID NO: 14779 - protein, 25 aa, synthetic construct
  REGION 1..25: note = Description of Artificial Sequence: Synthetic peptide
VLTSHTVMPLSAPTLVPQEHYVRIT

SEQ ID NO: 14780 - protein, 25 aa, synthetic construct
  REGION 1..25: note = Description of Artificial Sequence: Synthetic peptide
IPYNSVTSSIVITSGDGTTSPISEH

SEQ ID NO: 14781 - protein, 25 aa, synthetic construct
  REGION 1..25: note = Description of Artificial Sequence: Synthetic peptide
EKALKYLPIDKCSRIIPARARVECF

SEQ ID NO: 14782 - protein, 25 aa, synthetic construct
  REGION 1..25: note = Description of Artificial Sequence: Synthetic peptide
CVVLHSYFTSDYYQLYSTQLSTDTG

SEQ ID NO: 14783 - protein, 25 aa, synthetic construct
  REGION 1..25: note = Description of Artificial Sequence: Synthetic peptide
RFDNPVLPFNDGVYFASTEKSNIIR

SEQ ID NO: 14784 - protein, 25 aa, synthetic construct
  REGION 1..25: note = Description of Artificial Sequence: Synthetic peptide
DCLGDIAARDLICAQKFNGLTVLPP

SEQ ID NO: 14785 - protein, 25 aa, synthetic construct
  REGION 1..25: note = Description of Artificial Sequence: Synthetic peptide
CLGDIAARDLICAQKFNGLTVLPPL

SEQ ID NO: 14786 - protein, 25 aa, synthetic construct
  REGION 1..25: note = Description of Artificial Sequence: Synthetic peptide
DYFVLTSHTVMPLSAPTLVPQEHYV

SEQ ID NO: 14787 - protein, 25 aa, synthetic construct
  REGION 1..25: note = Description of Artificial Sequence: Synthetic peptide
LGDISGINASVVNIQKEIDRLNEVA

SEQ ID NO: 14788 - protein, 25 aa, synthetic construct
  REGION 1..25: note = Description of Artificial Sequence: Synthetic peptide
DLGDISGINASVVNIQKEIDRLNEV

SEQ ID NO: 14789 - protein, 25 aa, synthetic construct
  REGION 1..25: note = Description of Artificial Sequence: Synthetic peptide
ILGAGCFVDDIVKTDGTLMIERFVS

SEQ ID NO: 14790 - protein, 25 aa, synthetic construct
  REGION 1..25: note = Description of Artificial Sequence: Synthetic peptide
LGAGCFVDDIVKTDGTLMIERFVSL

SEQ ID NO: 14791 - protein, 25 aa, synthetic construct
  REGION 1..25: note = Description of Artificial Sequence: Synthetic peptide
EIKDATPSDFVRATATIPIQASLPF

SEQ ID NO: 14792 - protein, 25 aa, synthetic construct
  REGION 1..25: note = Description of Artificial Sequence: Synthetic peptide
PFNDGVYFASTEKSNIIRGWIFGTT

SEQ ID NO: 14793 - protein, 25 aa, synthetic construct
  REGION 1..25: note = Description of Artificial Sequence: Synthetic peptide
FNDGVYFASTEKSNIIRGWIFGTTL

SEQ ID NO: 14794 - protein, 25 aa, synthetic construct
  REGION 1..25: note = Description of Artificial Sequence: Synthetic peptide
NDGVYFASTEKSNIIRGWIFGTTLD

SEQ ID NO: 14795 - protein, 25 aa, synthetic construct
  REGION 1..25: note = Description of Artificial Sequence: Synthetic peptide
VTPSGTWLTYTGAIKLDDKDPNFKD

SEQ ID NO: 14796 - protein, 25 aa, synthetic construct
  REGION 1..25: note = Description of Artificial Sequence: Synthetic peptide
EVTPSGTWLTYTGAIKLDDKDPNFK

SEQ ID NO: 14797 - protein, 25 aa, synthetic construct
  REGION 1..25: note = Description of Artificial Sequence: Synthetic peptide
SEETGTLIVNSVLLFLAFVVFLLVT

SEQ ID NO: 14798 - protein, 25 aa, synthetic construct
  REGION 1..25: note = Description of Artificial Sequence: Synthetic peptide
LFDMSKFPLKLRGTAVMSLKEGQIN

SEQ ID NO: 14799 - protein, 25 aa, synthetic construct
  REGION 1..25: note = Description of Artificial Sequence: Synthetic peptide
GVPVVDSYYSLLMPILTLTRALTAE

SEQ ID NO: 14800 - protein, 25 aa, synthetic construct
  REGION 1..25: note = Description of Artificial Sequence: Synthetic peptide
TPTWRVYSTGSNVFQTRAGCLIGAE

SEQ ID NO: 14801 - protein, 25 aa, synthetic construct
  REGION 1..25: note = Description of Artificial Sequence: Synthetic peptide
QLTPTWRVYSTGSNVFQTRAGCLIG

SEQ ID NO: 14802 - protein, 25 aa, synthetic construct
  REGION 1..25: note = Description of Artificial Sequence: Synthetic peptide
LTPTWRVYSTGSNVFQTRAGCLIGA

SEQ ID NO: 14803 - protein, 25 aa, synthetic construct
  REGION 1..25: note = Description of Artificial Sequence: Synthetic peptide
ALPETTADIVVFDEISMATNYDLSV

SEQ ID NO: 14804 - protein, 25 aa, synthetic construct
  REGION 1..25: note = Description of Artificial Sequence: Synthetic peptide
NALPETTADIVVFDEISMATNYDLS

SEQ ID NO: 14805 - protein, 25 aa, synthetic construct
  REGION 1..25: note = Description of Artificial Sequence: Synthetic peptide
LPETTADIVVFDEISMATNYDLSVV

SEQ ID NO: 14806 - protein, 25 aa, synthetic construct
  REGION 1..25: note = Description of Artificial Sequence: Synthetic peptide
YYSLLMPILTLTRALTAESHVDTDL

SEQ ID NO: 14807 - protein, 25 aa, synthetic construct
  REGION 1..25: note = Description of Artificial Sequence: Synthetic peptide
SLLMPILTLTRALTAESHVDTDLTK

SEQ ID NO: 14808 - protein, 25 aa, synthetic construct
  REGION 1..25: note = Description of Artificial Sequence: Synthetic peptide
YSLLMPILTLTRALTAESHVDTDLT

SEQ ID NO: 14809 - protein, 25 aa, synthetic construct
  REGION 1..25: note = Description of Artificial Sequence: Synthetic peptide
SYYSLLMPILTLTRALTAESHVDTD

SEQ ID NO: 14810 - protein, 25 aa, synthetic construct
  REGION 1..25: note = Description of Artificial Sequence: Synthetic peptide
LMPILTLTRALTAESHVDTDLTKPY

SEQ ID NO: 14811 - protein, 25 aa, synthetic construct
  REGION 1..25: note = Description of Artificial Sequence: Synthetic peptide
LLMPILTLTRALTAESHVDTDLTKP

SEQ ID NO: 14812 - protein, 25 aa, synthetic construct
  REGION 1..25: note = Description of Artificial Sequence: Synthetic peptide
TVSALVYDNKLKAHKDKSAQCFKMF

SEQ ID NO: 14813 - protein, 25 aa, synthetic construct
  REGION 1..25: note = Description of Artificial Sequence: Synthetic peptide
DYILANTCTERLKLFAAETLKATEE

SEQ ID NO: 14814 - protein, 25 aa, synthetic construct
  REGION 1..25: note = Description of Artificial Sequence: Synthetic peptide
YILANTCTERLKLFAAETLKATEET

SEQ ID NO: 14815 - protein, 25 aa, synthetic construct
  REGION 1..25: note = Description of Artificial Sequence: Synthetic peptide
DDFVEIIKSQDLSVVSKVVKVTIDY

SEQ ID NO: 14816 - protein, 25 aa, synthetic construct
  REGION 1..25: note = Description of Artificial Sequence: Synthetic peptide
ARMAGNGGDAALALLLLDRLNQLES

SEQ ID NO: 14817 - protein, 25 aa, synthetic construct
  REGION 1..25: note = Description of Artificial Sequence: Synthetic peptide
SYGIATVREVLSDRELHLSWEVGKP

SEQ ID NO: 14818 - protein, 25 aa, synthetic construct
  REGION 1..25: note = Description of Artificial Sequence: Synthetic peptide
LSYGIATVREVLSDRELHLSWEVGK

SEQ ID NO: 14819 - protein, 25 aa, synthetic construct
  REGION 1..25: note = Description of Artificial Sequence: Synthetic peptide
PSRILGAGCFVDDIVKTDGTLMIER

SEQ ID NO: 14820 - protein, 25 aa, synthetic construct
  REGION 1..25: note = Description of Artificial Sequence: Synthetic peptide
GEVFNATRFASVYAWNRKRISNCVA

SEQ ID NO: 14821 - protein, 25 aa, synthetic construct
  REGION 1..25: note = Description of Artificial Sequence: Synthetic peptide
NDPFLGVYYHKNNKSWMESEFRVYS

SEQ ID NO: 14822 - protein, 25 aa, synthetic construct
  REGION 1..25: note = Description of Artificial Sequence: Synthetic peptide
CNDPFLGVYYHKNNKSWMESEFRVY

SEQ ID NO: 14823 - protein, 25 aa, synthetic construct
  REGION 1..25: note = Description of Artificial Sequence: Synthetic peptide
QFCNDPFLGVYYHKNNKSWMESEFR

SEQ ID NO: 14824 - protein, 25 aa, synthetic construct
  REGION 1..25: note = Description of Artificial Sequence: Synthetic peptide
FCNDPFLGVYYHKNNKSWMESEFRV

SEQ ID NO: 14825 - protein, 25 aa, synthetic construct
  REGION 1..25: note = Description of Artificial Sequence: Synthetic peptide
RLQSLENVAFNVVNKGHFDGQQGEV

SEQ ID NO: 14826 - protein, 25 aa, synthetic construct
  REGION 1..25: note = Description of Artificial Sequence: Synthetic peptide
KPVPEVKILNNLGVDIAANTVIWDY

SEQ ID NO: 14827 - protein, 25 aa, synthetic construct
  REGION 1..25: note = Description of Artificial Sequence: Synthetic peptide
ISGINASVVNIQKEIDRLNEVAKNL

SEQ ID NO: 14828 - protein, 25 aa, synthetic construct
  REGION 1..25: note = Description of Artificial Sequence: Synthetic peptide
LTGHMLDMYSVMLTNDNTSRYWEPE

SEQ ID NO: 14829 - protein, 25 aa, synthetic construct
  REGION 1..25: note = Description of Artificial Sequence: Synthetic peptide
GHMLDMYSVMLTNDNTSRYWEPEFY

SEQ ID NO: 14830 - protein, 25 aa, synthetic construct
  REGION 1..25: note = Description of Artificial Sequence: Synthetic peptide
TGHMLDMYSVMLTNDNTSRYWEPEF

SEQ ID NO: 14831 - protein, 25 aa, synthetic construct
  REGION 1..25: note = Description of Artificial Sequence: Synthetic peptide
TPINLVRDLPQGFSALEPLVDLPIG

SEQ ID NO: 14832 - protein, 25 aa, synthetic construct
  REGION 1..25: note = Description of Artificial Sequence: Synthetic peptide
FPLKLRGTAVMSLKEGQINDMILSL

SEQ ID NO: 14833 - protein, 25 aa, synthetic construct
  REGION 1..25: note = Description of Artificial Sequence: Synthetic peptide
KFPLKLRGTAVMSLKEGQINDMILS

SEQ ID NO: 14834 - protein, 25 aa, synthetic construct
  REGION 1..25: note = Description of Artificial Sequence: Synthetic peptide
DKFKVNSTLEQYVFCTVNALPETTA

SEQ ID NO: 14835 - protein, 25 aa, synthetic construct
  REGION 1..25: note = Description of Artificial Sequence: Synthetic peptide
PVVDSYYSLLMPILTLTRALTAESH

SEQ ID NO: 14836 - protein, 25 aa, synthetic construct
  REGION 1..25: note = Description of Artificial Sequence: Synthetic peptide
VPVVDSYYSLLMPILTLTRALTAES

SEQ ID NO: 14837 - protein, 25 aa, synthetic construct
  REGION 1..25: note = Description of Artificial Sequence: Synthetic peptide
IDGYFKIYSKHTPINLVRDLPQGFS

SEQ ID NO: 14838 - protein, 25 aa, synthetic construct
  REGION 1..25: note = Description of Artificial Sequence: Synthetic peptide
NNTVYDPLQPELDSFKEELDKYFKN

SEQ ID NO: 14839 - protein, 25 aa, synthetic construct
  REGION 1..25: note = Description of Artificial Sequence: Synthetic peptide
NTVYDPLQPELDSFKEELDKYFKNH

SEQ ID NO: 14840 - protein, 25 aa, synthetic construct
  REGION 1..25: note = Description of Artificial Sequence: Synthetic peptide
YSFVSEETGTLIVNSVLLFLAFVVF

SEQ ID NO: 14841 - protein, 25 aa, synthetic construct
  REGION 1..25: note = Description of Artificial Sequence: Synthetic peptide
FSVAALTNNVAFQTVKPGNFNKDFY

SEQ ID NO: 14842 - protein, 25 aa, synthetic construct
  REGION 1..25: note = Description of Artificial Sequence: Synthetic peptide
IMRTFKVSIWNLDYIINLIIKNLSK

SEQ ID NO: 14843 - protein, 25 aa, synthetic construct
  REGION 1..25: note = Description of Artificial Sequence: Synthetic peptide
RKHFSMMILSDDAVVCFNSTYASQG

SEQ ID NO: 14844 - protein, 25 aa, synthetic construct
  REGION 1..25: note = Description of Artificial Sequence: Synthetic peptide
KHFSMMILSDDAVVCFNSTYASQGL

SEQ ID NO: 14845 - protein, 25 aa, synthetic construct
  REGION 1..25: note = Description of Artificial Sequence: Synthetic peptide
ALPQRQKKQQTVTLLPAADLDDFSK

SEQ ID NO: 14846 - protein, 25 aa, synthetic construct
  REGION 1..25: note = Description of Artificial Sequence: Synthetic peptide
LPQRQKKQQTVTLLPAADLDDFSKQ

SEQ ID NO: 14847 - protein, 25 aa, synthetic construct
  REGION 1..25: note = Description of Artificial Sequence: Synthetic peptide
QRQKKQQTVTLLPAADLDDFSKQLQ

SEQ ID NO: 14848 - protein, 25 aa, synthetic construct
  REGION 1..25: note = Description of Artificial Sequence: Synthetic peptide
PQRQKKQQTVTLLPAADLDDFSKQL

SEQ ID NO: 14849 - protein, 25 aa, synthetic construct
  REGION 1..25: note = Description of Artificial Sequence: Synthetic peptide
IPIGAGICASYQTQTNSPRRARSVA

SEQ ID NO: 14850 - protein, 25 aa, synthetic construct
  REGION 1..25: note = Description of Artificial Sequence: Synthetic peptide
DIPIGAGICASYQTQTNSPRRARSV

SEQ ID NO: 14851 - protein, 25 aa, synthetic construct
  REGION 1..25: note = Description of Artificial Sequence: Synthetic peptide
LALSKGVHFVCNLLLLFVTVYSHLL

SEQ ID NO: 14852 - protein, 25 aa, synthetic construct
  REGION 1..25: note = Description of Artificial Sequence: Synthetic peptide
SKGVHFVCNLLLLFVTVYSHLLLVA

SEQ ID NO: 14853 - protein, 25 aa, synthetic construct
  REGION 1..25: note = Description of Artificial Sequence: Synthetic peptide
LSKGVHFVCNLLLLFVTVYSHLLLV

SEQ ID NO: 14854 - protein, 25 aa, synthetic construct
  REGION 1..25: note = Description of Artificial Sequence: Synthetic peptide
ADKYVRNLQHRLYECLYRNRDVDTD

SEQ ID NO: 14855 - protein, 25 aa, synthetic construct
  REGION 1..25: note = Description of Artificial Sequence: Synthetic peptide
REEAIRHVRAWIGFDVEGCHATREA

SEQ ID NO: 14856 - protein, 25 aa, synthetic construct
  REGION 1..25: note = Description of Artificial Sequence: Synthetic peptide
VTQQLIRAAEIRASANLAATKMSEC

SEQ ID NO: 14857 - protein, 25 aa, synthetic construct
  REGION 1..25: note = Description of Artificial Sequence: Synthetic peptide
NFYEPQIITTDNTFVSGNCDVVIGI

SEQ ID NO: 14858 - protein, 25 aa, synthetic construct
  REGION 1..25: note = Description of Artificial Sequence: Synthetic peptide
YEPQIITTDNTFVSGNCDVVIGIVN

SEQ ID NO: 14859 - protein, 25 aa, synthetic construct
  REGION 1..25: note = Description of Artificial Sequence: Synthetic peptide
EPQIITTDNTFVSGNCDVVIGIVNN

SEQ ID NO: 14860 - protein, 25 aa, synthetic construct
  REGION 1..25: note = Description of Artificial Sequence: Synthetic peptide
FYEPQIITTDNTFVSGNCDVVIGIV

SEQ ID NO: 14861 - protein, 25 aa, synthetic construct
  REGION 1..25: note = Description of Artificial Sequence: Synthetic peptide
RNFYEPQIITTDNTFVSGNCDVVIG

SEQ ID NO: 14862 - protein, 25 aa, synthetic construct
  REGION 1..25: note = Description of Artificial Sequence: Synthetic peptide
VQPTESIVRFPNITNLCPFGEVFNA

SEQ ID NO: 14863 - protein, 25 aa, synthetic construct
  REGION 1..25: note = Description of Artificial Sequence: Synthetic peptide
RVQPTESIVRFPNITNLCPFGEVFN

SEQ ID NO: 14864 - protein, 25 aa, synthetic construct
  REGION 1..25: note = Description of Artificial Sequence: Synthetic peptide
ALSKGVHFVCNLLLLFVTVYSHLLL

SEQ ID NO: 14865 - protein, 25 aa, synthetic construct
  REGION 1..25: note = Description of Artificial Sequence: Synthetic peptide
VTLADAGFIKQYGDCLGDIAARDLI

SEQ ID NO: 14866 - protein, 25 aa, synthetic construct
  REGION 1..25: note = Description of Artificial Sequence: Synthetic peptide
KVTLADAGFIKQYGDCLGDIAARDL

SEQ ID NO: 14867 - protein, 25 aa, synthetic construct
  REGION 1..25: note = Description of Artificial Sequence: Synthetic peptide
NKVTLADAGFIKQYGDCLGDIAARD

SEQ ID NO: 14868 - protein, 25 aa, synthetic construct
  REGION 1..25: note = Description of Artificial Sequence: Synthetic peptide
FNKVTLADAGFIKQYGDCLGDIAAR

SEQ ID NO: 14869 - protein, 25 aa, synthetic construct
  REGION 1..25: note = Description of Artificial Sequence: Synthetic peptide
SNFGAISSVLNDILSRLDKVEAEVQ

SEQ ID NO: 14870 - protein, 25 aa, synthetic construct
  REGION 1..25: note = Description of Artificial Sequence: Synthetic peptide
NFGAISSVLNDILSRLDKVEAEVQI

SEQ ID NO: 14871 - protein, 25 aa, synthetic construct
  REGION 1..25: note = Description of Artificial Sequence: Synthetic peptide
FGAISSVLNDILSRLDKVEAEVQID

SEQ ID NO: 14872 - protein, 25 aa, synthetic construct
  REGION 1..25: note = Description of Artificial Sequence: Synthetic peptide
LEDFIPMDSTVKNYFITDAQTGSSK

SEQ ID NO: 14873 - protein, 25 aa, synthetic construct
  REGION 1..25: note = Description of Artificial Sequence: Synthetic peptide
EDFIPMDSTVKNYFITDAQTGSSKC

SEQ ID NO: 14874 - protein, 25 aa, synthetic construct
  REGION 1..25: note = Description of Artificial Sequence: Synthetic peptide
HKNNKSWMESEFRVYSSANNCTFEY

SEQ ID NO: 14875 - protein, 25 aa, synthetic construct
  REGION 1..25: note = Description of Artificial Sequence: Synthetic peptide
FGDFIQTTPGSGVPVVDSYYSLLMP

SEQ ID NO: 14876 - protein, 25 aa, synthetic construct
  REGION 1..25: note = Description of Artificial Sequence: Synthetic peptide
IAQFAPSASAFFGMSRIGMEVTPSG

SEQ ID NO: 14877 - protein, 25 aa, synthetic construct
  REGION 1..25: note = Description of Artificial Sequence: Synthetic peptide
APSASAFFGMSRIGMEVTPSGTWLT

SEQ ID NO: 14878 - protein, 25 aa, synthetic construct
  REGION 1..25: note = Description of Artificial Sequence: Synthetic peptide
AQFAPSASAFFGMSRIGMEVTPSGT

SEQ ID NO: 14879 - protein, 25 aa, synthetic construct
  REGION 1..25: note = Description of Artificial Sequence: Synthetic peptide
QIAQFAPSASAFFGMSRIGMEVTPS

SEQ ID NO: 14880 - protein, 25 aa, synthetic construct
  REGION 1..25: note = Description of Artificial Sequence: Synthetic peptide
QFAPSASAFFGMSRIGMEVTPSGTW

SEQ ID NO: 14881 - protein, 25 aa, synthetic construct
  REGION 1..25: note = Description of Artificial Sequence: Synthetic peptide
FAPSASAFFGMSRIGMEVTPSGTWL

SEQ ID NO: 14882 - protein, 25 aa, synthetic construct
  REGION 1..25: note = Description of Artificial Sequence: Synthetic peptide
NVTWFHAIHVSGTNGTKRFDNPVLP

SEQ ID NO: 14883 - protein, 25 aa, synthetic construct
  REGION 1..25: note = Description of Artificial Sequence: Synthetic peptide
TDGNKIADKYVRNLQHRLYECLYRN

SEQ ID NO: 14884 - protein, 25 aa, synthetic construct
  REGION 1..25: note = Description of Artificial Sequence: Synthetic peptide
GAGICASYQTQTNSPRRARSVASQS

SEQ ID NO: 14885 - protein, 25 aa, synthetic construct
  REGION 1..25: note = Description of Artificial Sequence: Synthetic peptide
AGICASYQTQTNSPRRARSVASQSI

SEQ ID NO: 14886 - protein, 25 aa, synthetic construct
  REGION 1..25: note = Description of Artificial Sequence: Synthetic peptide
SNGTITVEELKKLLEQWNLVIGFLF

SEQ ID NO: 14887 - protein, 25 aa, synthetic construct
  REGION 1..25: note = Description of Artificial Sequence: Synthetic peptide
ENPDILRVYANLGERVRQALLKTVQ

SEQ ID NO: 14888 - protein, 25 aa, synthetic construct
  REGION 1..25: note = Description of Artificial Sequence: Synthetic peptide
SLSHRFYRLANECAQVLSEMVMCGG

SEQ ID NO: 14889 - protein, 25 aa, synthetic construct
  REGION 1..25: note = Description of Artificial Sequence: Synthetic peptide
LSHRFYRLANECAQVLSEMVMCGGS

SEQ ID NO: 14890 - protein, 25 aa, synthetic construct
  REGION 1..25: note = Description of Artificial Sequence: Synthetic peptide
QTVTLLPAADLDDFSKQLQQSMSSA

SEQ ID NO: 14891 - protein, 25 aa, synthetic construct
  REGION 1..25: note = Description of Artificial Sequence: Synthetic peptide
IRVGARKSAPLIELCVDEAGSKSPI

SEQ ID NO: 14892 - protein, 25 aa, synthetic construct
  REGION 1..25: note = Description of Artificial Sequence: Synthetic peptide
YIRVGARKSAPLIELCVDEAGSKSP

SEQ ID NO: 14893 - protein, 25 aa, synthetic construct
  REGION 1..25: note = Description of Artificial Sequence: Synthetic peptide
RVGARKSAPLIELCVDEAGSKSPIQ

SEQ ID NO: 14894 - protein, 25 aa, synthetic construct
  REGION 1..25: note = Description of Artificial Sequence: Synthetic peptide
VGARKSAPLIELCVDEAGSKSPIQY

SEQ ID NO: 14895 - protein, 25 aa, synthetic construct
  REGION 1..25: note = Description of Artificial Sequence: Synthetic peptide
WYIRVGARKSAPLIELCVDEAGSKS

SEQ ID NO: 14896 - protein, 25 aa, synthetic construct
  REGION 1..25: note = Description of Artificial Sequence: Synthetic peptide
SARIVYTACSHAAVDALCEKALKYL

SEQ ID NO: 14897 - protein, 25 aa, synthetic construct
  REGION 1..25: note = Description of Artificial Sequence: Synthetic peptide
AMPNLYKMQRMLLEKCDLQNYGDSA

SEQ ID NO: 14898 - protein, 25 aa, synthetic construct
  REGION 1..25: note = Description of Artificial Sequence: Synthetic peptide
LAFVVFLLVTLAILTALRLCAYCCN

SEQ ID NO: 14899 - protein, 25 aa, synthetic construct
  REGION 1..25: note = Description of Artificial Sequence: Synthetic peptide
AFVVFLLVTLAILTALRLCAYCCNI

SEQ ID NO: 14900 - protein, 25 aa, synthetic construct
  REGION 1..25: note = Description of Artificial Sequence: Synthetic peptide
FVVFLLVTLAILTALRLCAYCCNIV

SEQ ID NO: 14901 - protein, 25 aa, synthetic construct
  REGION 1..25: note = Description of Artificial Sequence: Synthetic peptide
QHEETIYNLLKDCPAVAKHDFFKFR

SEQ ID NO: 14902 - protein, 25 aa, synthetic construct
  REGION 1..25: note = Description of Artificial Sequence: Synthetic peptide
KIITLKKRWQLALSKGVHFVCNLLL

SEQ ID NO: 14903 - protein, 25 aa, synthetic construct
  REGION 1..25: note = Description of Artificial Sequence: Synthetic peptide
ATNYDLSVVNARLRAKHYVYIGDPA

SEQ ID NO: 14904 - protein, 25 aa, synthetic construct
  REGION 1..25: note = Description of Artificial Sequence: Synthetic peptide
ISAKNRARTVAGVSICSTMTNRQFH

SEQ ID NO: 14905 - protein, 25 aa, synthetic construct
  REGION 1..25: note = Description of Artificial Sequence: Synthetic peptide
TLKKRWQLALSKGVHFVCNLLLLFV

SEQ ID NO: 14906 - protein, 25 aa, synthetic construct
  REGION 1..25: note = Description of Artificial Sequence: Synthetic peptide
KFKVNSTLEQYVFCTVNALPETTAD

SEQ ID NO: 14907 - protein, 25 aa, synthetic construct
  REGION 1..25: note = Description of Artificial Sequence: Synthetic peptide
VNSTLEQYVFCTVNALPETTADIVV

SEQ ID NO: 14908 - protein, 25 aa, synthetic construct
  REGION 1..25: note = Description of Artificial Sequence: Synthetic peptide
FKVNSTLEQYVFCTVNALPETTADI

SEQ ID NO: 14909 - protein, 25 aa, synthetic construct
  REGION 1..25: note = Description of Artificial Sequence: Synthetic peptide
STLEQYVFCTVNALPETTADIVVFD

SEQ ID NO: 14910 - protein, 25 aa, synthetic construct
  REGION 1..25: note = Description of Artificial Sequence: Synthetic peptide
NSTLEQYVFCTVNALPETTADIVVF

SEQ ID NO: 14911 - protein, 25 aa, synthetic construct
  REGION 1..25: note = Description of Artificial Sequence: Synthetic peptide
KVNSTLEQYVFCTVNALPETTADIV

SEQ ID NO: 14912 - protein, 25 aa, synthetic construct
  REGION 1..25: note = Description of Artificial Sequence: Synthetic peptide
TLEQYVFCTVNALPETTADIVVFDE

SEQ ID NO: 14913 - protein, 25 aa, synthetic construct
  REGION 1..25: note = Description of Artificial Sequence: Synthetic peptide
VTQRNFYEPQIITTDNTFVSGNCDV

SEQ ID NO: 14914 - protein, 25 aa, synthetic construct
  REGION 1..25: note = Description of Artificial Sequence: Synthetic peptide
MILSDDAVVCFNSTYASQGLVASIK

SEQ ID NO: 14915 - protein, 25 aa, synthetic construct
  REGION 1..25: note = Description of Artificial Sequence: Synthetic peptide
MMILSDDAVVCFNSTYASQGLVASI

SEQ ID NO: 14916 - protein, 25 aa, synthetic construct
  REGION 1..25: note = Description of Artificial Sequence: Synthetic peptide
ILSDDAVVCFNSTYASQGLVASIKN

SEQ ID NO: 14917 - protein, 25 aa, synthetic construct
  REGION 1..25: note = Description of Artificial Sequence: Synthetic peptide
SMMILSDDAVVCFNSTYASQGLVAS

SEQ ID NO: 14918 - protein, 25 aa, synthetic construct
  REGION 1..25: note = Description of Artificial Sequence: Synthetic peptide
LSLLSKGRLIIRENNRVVISSDVLV

SEQ ID NO: 14919 - protein, 25 aa, synthetic construct
  REGION 1..25: note = Description of Artificial Sequence: Synthetic peptide
LLSKGRLIIRENNRVVISSDVLVNN

SEQ ID NO: 14920 - protein, 25 aa, synthetic construct
  REGION 1..25: note = Description of Artificial Sequence: Synthetic peptide
MILSLLSKGRLIIRENNRVVISSDV

SEQ ID NO: 14921 - protein, 25 aa, synthetic construct
  REGION 1..25: note = Description of Artificial Sequence: Synthetic peptide
SLLSKGRLIIRENNRVVISSDVLVN

SEQ ID NO: 14922 - protein, 25 aa, synthetic construct
  REGION 1..25: note = Description of Artificial Sequence: Synthetic peptide
ILSLLSKGRLIIRENNRVVISSDVL

SEQ ID NO: 14923 - protein, 25 aa, synthetic construct
  REGION 1..25: note = Description of Artificial Sequence: Synthetic peptide
GLMWLSYFIASFRLFARTRSMWSFN

SEQ ID NO: 14924 - protein, 25 aa, synthetic construct
  REGION 1..25: note = Description of Artificial Sequence: Synthetic peptide
TRFASVYAWNRKRISNCVADYSVLY

SEQ ID NO: 14925 - protein, 25 aa, synthetic construct
  REGION 1..25: note = Description of Artificial Sequence: Synthetic peptide
PQGLPNNTASWFTALTQHGKEDLKF

SEQ ID NO: 14926 - protein, 25 aa, synthetic construct
  REGION 1..25: note = Description of Artificial Sequence: Synthetic peptide
RRPQGLPNNTASWFTALTQHGKEDL

SEQ ID NO: 14927 - protein, 25 aa, synthetic construct
  REGION 1..25: note = Description of Artificial Sequence: Synthetic peptide
RPQGLPNNTASWFTALTQHGKEDLK

SEQ ID NO: 14928 - protein, 25 aa, synthetic construct
  REGION 1..25: note = Description of Artificial Sequence: Synthetic peptide
QRRPQGLPNNTASWFTALTQHGKED

SEQ ID NO: 14929 - protein, 25 aa, synthetic construct
  REGION 1..25: note = Description of Artificial Sequence: Synthetic peptide
HFVCNLLLLFVTVYSHLLLVAAGLE

SEQ ID NO: 14930 - protein, 25 aa, synthetic construct
  REGION 1..25: note = Description of Artificial Sequence: Synthetic peptide
VHFVCNLLLLFVTVYSHLLLVAAGL

SEQ ID NO: 14931 - protein, 25 aa, synthetic construct
  REGION 1..25: note = Description of Artificial Sequence: Synthetic peptide
VNQNAQALNTLVKQLSSNFGAISSV

SEQ ID NO: 14932 - protein, 25 aa, synthetic construct
  REGION 1..25: note = Description of Artificial Sequence: Synthetic peptide
NQNAQALNTLVKQLSSNFGAISSVL

SEQ ID NO: 14933 - protein, 25 aa, synthetic construct
  REGION 1..25: note = Description of Artificial Sequence: Synthetic peptide
VDTDFVNEFYAYLRKHFSMMILSDD

SEQ ID NO: 14934 - protein, 25 aa, synthetic construct
  REGION 1..25: note = Description of Artificial Sequence: Synthetic peptide
DVDTDFVNEFYAYLRKHFSMMILSD

SEQ ID NO: 14935 - protein, 25 aa, synthetic construct
  REGION 1..25: note = Description of Artificial Sequence: Synthetic peptide
LLLQYGSFCTQLNRALTGIAVEQDK

SEQ ID NO: 14936 - protein, 25 aa, synthetic construct
  REGION 1..25: note = Description of Artificial Sequence: Synthetic peptide
HTFSNYQHEETIYNLLKDCPAVAKH

SEQ ID NO: 14937 - protein, 25 aa, synthetic construct
  REGION 1..25: note = Description of Artificial Sequence: Synthetic peptide
VPVAIHADQLTPTWRVYSTGSNVFQ

SEQ ID NO: 14938 - protein, 25 aa, synthetic construct
  REGION 1..25: note = Description of Artificial Sequence: Synthetic peptide
LVYFLQSINFVRIIMRLWLCWKCRS

SEQ ID NO: 14939 - protein, 25 aa, synthetic construct
  REGION 1..25: note = Description of Artificial Sequence: Synthetic peptide
VLARKHTTCCSLSHRFYRLANECAQ

SEQ ID NO: 14940 - protein, 25 aa, synthetic construct
  REGION 1..25: note = Description of Artificial Sequence: Synthetic peptide
WFVTQRNFYEPQIITTDNTFVSGNC

SEQ ID NO: 14941 - protein, 25 aa, synthetic construct
  REGION 1..25: note = Description of Artificial Sequence: Synthetic peptide
LPAADLDDFSKQLQQSMSSADSTQA

SEQ ID NO: 14942 - protein, 25 aa, synthetic construct
  REGION 1..25: note = Description of Artificial Sequence: Synthetic peptide
PNQEYADVFHLYLQYIRKLHDELTG

SEQ ID NO: 14943 - protein, 25 aa, synthetic construct
  REGION 1..25: note = Description of Artificial Sequence: Synthetic peptide
EDQDALFAYTKRNVIPTITQMNLKY

SEQ ID NO: 14944 - protein, 25 aa, synthetic construct
  REGION 1..25: note = Description of Artificial Sequence: Synthetic peptide
LWAKRNIKPVPEVKILNNLGVDIAA

SEQ ID NO: 14945 - protein, 25 aa, synthetic construct
  REGION 1..25: note = Description of Artificial Sequence: Synthetic peptide
HAIHVSGTNGTKRFDNPVLPFNDGV

SEQ ID NO: 14946 - protein, 25 aa, synthetic construct
  REGION 1..25: note = Description of Artificial Sequence: Synthetic peptide
FHAIHVSGTNGTKRFDNPVLPFNDG

SEQ ID NO: 14947 - protein, 25 aa, synthetic construct
  REGION 1..25: note = Description of Artificial Sequence: Synthetic peptide
IDSYFVVKRHTFSNYQHEETIYNLL

SEQ ID NO: 14948 - protein, 25 aa, synthetic construct
  REGION 1..25: note = Description of Artificial Sequence: Synthetic peptide
VSNGTHWFVTQRNFYEPQIITTDNT

SEQ ID NO: 14949 - protein, 25 aa, synthetic construct
  REGION 1..25: note = Description of Artificial Sequence: Synthetic peptide
SNGTHWFVTQRNFYEPQIITTDNTF

SEQ ID NO: 14950 - protein, 25 aa, synthetic construct
  REGION 1..25: note = Description of Artificial Sequence: Synthetic peptide
FVSNGTHWFVTQRNFYEPQIITTDN

SEQ ID NO: 14951 - protein, 25 aa, synthetic construct
  REGION 1..25: note = Description of Artificial Sequence: Synthetic peptide
LPGCDGGSLYVNKHAFHTPAFDKSA

SEQ ID NO: 14952 - protein, 25 aa, synthetic construct
  REGION 1..25: note = Description of Artificial Sequence: Synthetic peptide
GCDGGSLYVNKHAFHTPAFDKSAFV

SEQ ID NO: 14953 - protein, 25 aa, synthetic construct
  REGION 1..25: note = Description of Artificial Sequence: Synthetic peptide
LNLPGCDGGSLYVNKHAFHTPAFDK

SEQ ID NO: 14954 - protein, 25 aa, synthetic construct
  REGION 1..25: note = Description of Artificial Sequence: Synthetic peptide
NLNLPGCDGGSLYVNKHAFHTPAFD

SEQ ID NO: 14955 - protein, 25 aa, synthetic construct
  REGION 1..25: note = Description of Artificial Sequence: Synthetic peptide
PGCDGGSLYVNKHAFHTPAFDKSAF

SEQ ID NO: 14956 - protein, 25 aa, synthetic construct
  REGION 1..25: note = Description of Artificial Sequence: Synthetic peptide
NLPGCDGGSLYVNKHAFHTPAFDKS

SEQ ID NO: 14957 - protein, 25 aa, synthetic construct
  REGION 1..25: note = Description of Artificial Sequence: Synthetic peptide
GTHWFVTQRNFYEPQIITTDNTFVS

SEQ ID NO: 14958 - protein, 25 aa, synthetic construct
  REGION 1..25: note = Description of Artificial Sequence: Synthetic peptide
SPFELEDFIPMDSTVKNYFITDAQT

SEQ ID NO: 14959 - protein, 25 aa, synthetic construct
  REGION 1..25: note = Description of Artificial Sequence: Synthetic peptide
RFKESPFELEDFIPMDSTVKNYFIT

SEQ ID NO: 14960 - protein, 25 aa, synthetic construct
  REGION 1..25: note = Description of Artificial Sequence: Synthetic peptide
FKESPFELEDFIPMDSTVKNYFITD

SEQ ID NO: 14961 - protein, 25 aa, synthetic construct
  REGION 1..25: note = Description of Artificial Sequence: Synthetic peptide
ESPFELEDFIPMDSTVKNYFITDAQ

SEQ ID NO: 14962 - protein, 25 aa, synthetic construct
  REGION 1..25: note = Description of Artificial Sequence: Synthetic peptide
KESPFELEDFIPMDSTVKNYFITDA

SEQ ID NO: 14963 - protein, 25 aa, synthetic construct
  REGION 1..25: note = Description of Artificial Sequence: Synthetic peptide
GLAKRFKESPFELEDFIPMDSTVKN

SEQ ID NO: 14964 - protein, 25 aa, synthetic construct
  REGION 1..25: note = Description of Artificial Sequence: Synthetic peptide
NLCPFGEVFNATRFASVYAWNRKRI

SEQ ID NO: 14965 - protein, 25 aa, synthetic construct
  REGION 1..25: note = Description of Artificial Sequence: Synthetic peptide
TNLCPFGEVFNATRFASVYAWNRKR

SEQ ID NO: 14966 - protein, 25 aa, synthetic construct
  REGION 1..25: note = Description of Artificial Sequence: Synthetic peptide
LCPFGEVFNATRFASVYAWNRKRIS

SEQ ID NO: 14967 - protein, 25 aa, synthetic construct
  REGION 1..25: note = Description of Artificial Sequence: Synthetic peptide
FTRLQSLENVAFNVVNKGHFDGQQG

SEQ ID NO: 14968 - protein, 25 aa, synthetic construct
  REGION 1..25: note = Description of Artificial Sequence: Synthetic peptide
TSIKWADNNCYLATALLTLQQIELK

SEQ ID NO: 14969 - protein, 25 aa, synthetic construct
  REGION 1..25: note = Description of Artificial Sequence: Synthetic peptide
LTSIKWADNNCYLATALLTLQQIEL

SEQ ID NO: 14970 - protein, 25 aa, synthetic construct
  REGION 1..25: note = Description of Artificial Sequence: Synthetic peptide
GLTSIKWADNNCYLATALLTLQQIE

SEQ ID NO: 14971 - protein, 25 aa, synthetic construct
  REGION 1..25: note = Description of Artificial Sequence: Synthetic peptide
LKSEDAQGMDNLACEDLKPVSEEVV

SEQ ID NO: 14972 - protein, 25 aa, synthetic construct
  REGION 1..25: note = Description of Artificial Sequence: Synthetic peptide
YLYALVYFLQSINFVRIIMRLWLCW

SEQ ID NO: 14973 - protein, 25 aa, synthetic construct
  REGION 1..25: note = Description of Artificial Sequence: Synthetic peptide
GCFVDDIVKTDGTLMIERFVSLAID

SEQ ID NO: 14974 - protein, 25 aa, synthetic construct
  REGION 1..25: note = Description of Artificial Sequence: Synthetic peptide
RAAEIRASANLAATKMSECVLGQSK

SEQ ID NO: 14975 - protein, 25 aa, synthetic construct
  REGION 1..25: note = Description of Artificial Sequence: Synthetic peptide
IRAAEIRASANLAATKMSECVLGQS

SEQ ID NO: 14976 - protein, 25 aa, synthetic construct
  REGION 1..25: note = Description of Artificial Sequence: Synthetic peptide
FDNPVLPFNDGVYFASTEKSNIIRG

SEQ ID NO: 14977 - protein, 25 aa, synthetic construct
  REGION 1..25: note = Description of Artificial Sequence: Synthetic peptide
TRGVYYPDKVFRSSVLHSTQDLFLP

SEQ ID NO: 14978 - protein, 25 aa, synthetic construct
  REGION 1..25: note = Description of Artificial Sequence: Synthetic peptide
YYPDKVFRSSVLHSTQDLFLPFFSN

SEQ ID NO: 14979 - protein, 25 aa, synthetic construct
  REGION 1..25: note = Description of Artificial Sequence: Synthetic peptide
RGVYYPDKVFRSSVLHSTQDLFLPF

SEQ ID NO: 14980 - protein, 25 aa, synthetic construct
  REGION 1..25: note = Description of Artificial Sequence: Synthetic peptide
GVYYPDKVFRSSVLHSTQDLFLPFF

SEQ ID NO: 14981 - protein, 25 aa, synthetic construct
  REGION 1..25: note = Description of Artificial Sequence: Synthetic peptide
VYYPDKVFRSSVLHSTQDLFLPFFS

SEQ ID NO: 14982 - protein, 25 aa, synthetic construct
  REGION 1..25: note = Description of Artificial Sequence: Synthetic peptide
YPDKVFRSSVLHSTQDLFLPFFSNV

SEQ ID NO: 14983 - protein, 25 aa, synthetic construct
  REGION 1..25: note = Description of Artificial Sequence: Synthetic peptide
NYLKRRVVFNGVSFSTFEEAALCTF

SEQ ID NO: 14984 - protein, 25 aa, synthetic construct
  REGION 1..25: note = Description of Artificial Sequence: Synthetic peptide
SNYLKRRVVFNGVSFSTFEEAALCT

SEQ ID NO: 14985 - protein, 25 aa, synthetic construct
  REGION 1..25: note = Description of Artificial Sequence: Synthetic peptide
LKRRVVFNGVSFSTFEEAALCTFLL

SEQ ID NO: 14986 - protein, 25 aa, synthetic construct
  REGION 1..25: note = Description of Artificial Sequence: Synthetic peptide
YLKRRVVFNGVSFSTFEEAALCTFL

SEQ ID NO: 14987 - protein, 25 aa, synthetic construct
  REGION 1..25: note = Description of Artificial Sequence: Synthetic peptide
GVVQLTSQWLTNIFGTVYEKLKPVL

SEQ ID NO: 14988 - protein, 25 aa, synthetic construct
  REGION 1..25: note = Description of Artificial Sequence: Synthetic peptide
YALVYFLQSINFVRIIMRLWLCWKC

SEQ ID NO: 14989 - protein, 25 aa, synthetic construct
  REGION 1..25: note = Description of Artificial Sequence: Synthetic peptide
KELLVYAADPAMHAASGNLLLDKRT

SEQ ID NO: 14990 - protein, 25 aa, synthetic construct
  REGION 1..25: note = Description of Artificial Sequence: Synthetic peptide
PSKLIEYTDFATSACVLAAECTIFK

SEQ ID NO: 14991 - protein, 25 aa, synthetic construct
  REGION 1..25: note = Description of Artificial Sequence: Synthetic peptide
YFVLTSHTVMPLSAPTLVPQEHYVR

SEQ ID NO: 14992 - protein, 25 aa, synthetic construct
  REGION 1..25: note = Description of Artificial Sequence: Synthetic peptide
FVLTSHTVMPLSAPTLVPQEHYVRI

SEQ ID NO: 14993 - protein, 25 aa, synthetic construct
  REGION 1..25: note = Description of Artificial Sequence: Synthetic peptide
GDAALALLLLDRLNQLESKMSGKGQ

SEQ ID NO: 14994 - protein, 25 aa, synthetic construct
  REGION 1..25: note = Description of Artificial Sequence: Synthetic peptide
ALCEKALKYLPIDKCSRIIPARARV

SEQ ID NO: 14995 - protein, 25 aa, synthetic construct
  REGION 1..25: note = Description of Artificial Sequence: Synthetic peptide
DALCEKALKYLPIDKCSRIIPARAR

SEQ ID NO: 14996 - protein, 25 aa, synthetic construct
  REGION 1..25: note = Description of Artificial Sequence: Synthetic peptide
AKSASVYYSQLMCQPILLLDQALVS

SEQ ID NO: 14997 - protein, 25 aa, synthetic construct
  REGION 1..25: note = Description of Artificial Sequence: Synthetic peptide
SASVYYSQLMCQPILLLDQALVSDV

SEQ ID NO: 14998 - protein, 25 aa, synthetic construct
  REGION 1..25: note = Description of Artificial Sequence: Synthetic peptide
ASVYYSQLMCQPILLLDQALVSDVG

SEQ ID NO: 14999 - protein, 25 aa, synthetic construct
  REGION 1..25: note = Description of Artificial Sequence: Synthetic peptide
KSASVYYSQLMCQPILLLDQALVSD

SEQ ID NO: 15000 - protein, 25 aa, synthetic construct
  REGION 1..25: note = Description of Artificial Sequence: Synthetic peptide
KALKYLPIDKCSRIIPARARVECFD

SEQ ID NO: 15001 - protein, 25 aa, synthetic construct
  REGION 1..25: note = Description of Artificial Sequence: Synthetic peptide
VVTTVMFLARGIVFMCVEYCPIFFI

SEQ ID NO: 15002 - protein, 25 aa, synthetic construct
  REGION 1..25: note = Description of Artificial Sequence: Synthetic peptide
GVVTTVMFLARGIVFMCVEYCPIFF

SEQ ID NO: 15003 - protein, 25 aa, synthetic construct
  REGION 1..25: note = Description of Artificial Sequence: Synthetic peptide
TVMFLARGIVFMCVEYCPIFFITGN

SEQ ID NO: 15004 - protein, 25 aa, synthetic construct
  REGION 1..25: note = Description of Artificial Sequence: Synthetic peptide
VMFLARGIVFMCVEYCPIFFITGNT

SEQ ID NO: 15005 - protein, 25 aa, synthetic construct
  REGION 1..25: note = Description of Artificial Sequence: Synthetic peptide
VTTVMFLARGIVFMCVEYCPIFFIT

SEQ ID NO: 15006 - protein, 25 aa, synthetic construct
  REGION 1..25: note = Description of Artificial Sequence: Synthetic peptide
TTVMFLARGIVFMCVEYCPIFFITG

SEQ ID NO: 15007 - protein, 25 aa, synthetic construct
  REGION 1..25: note = Description of Artificial Sequence: Synthetic peptide
TEEVGHTDLMAAYVDNSSLTIKKPN

SEQ ID NO: 15008 - protein, 25 aa, synthetic construct
  REGION 1..25: note = Description of Artificial Sequence: Synthetic peptide
EVGHTDLMAAYVDNSSLTIKKPNEL

SEQ ID NO: 15009 - protein, 25 aa, synthetic construct
  REGION 1..25: note = Description of Artificial Sequence: Synthetic peptide
EEVGHTDLMAAYVDNSSLTIKKPNE

SEQ ID NO: 15010 - protein, 25 aa, synthetic construct
  REGION 1..25: note = Description of Artificial Sequence: Synthetic peptide
VGHTDLMAAYVDNSSLTIKKPNELS

SEQ ID NO: 15011 - protein, 25 aa, synthetic construct
  REGION 1..25: note = Description of Artificial Sequence: Synthetic peptide
IMQLFFSYFAVHFISNSWLMWLIIN

SEQ ID NO: 15012 - protein, 25 aa, synthetic construct
  REGION 1..25: note = Description of Artificial Sequence: Synthetic peptide
VEEVTTTLEETKFLTENLLLYIDIN

SEQ ID NO: 15013 - protein, 25 aa, synthetic construct
  REGION 1..25: note = Description of Artificial Sequence: Synthetic peptide
RGIVFMCVEYCPIFFITGNTLQCIM

SEQ ID NO: 15014 - protein, 25 aa, synthetic construct
  REGION 1..25: note = Description of Artificial Sequence: Synthetic peptide
GIVFMCVEYCPIFFITGNTLQCIML

SEQ ID NO: 15015 - protein, 25 aa, synthetic construct
  REGION 1..25: note = Description of Artificial Sequence: Synthetic peptide
FLARGIVFMCVEYCPIFFITGNTLQ

SEQ ID NO: 15016 - protein, 25 aa, synthetic construct
  REGION 1..25: note = Description of Artificial Sequence: Synthetic peptide
LARGIVFMCVEYCPIFFITGNTLQC

SEQ ID NO: 15017 - protein, 25 aa, synthetic construct
  REGION 1..25: note = Description of Artificial Sequence: Synthetic peptide
KRAKVTSAMQTMLFTMLRKLDNDAL

SEQ ID NO: 15018 - protein, 25 aa, synthetic construct
  REGION 1..25: note = Description of Artificial Sequence: Synthetic peptide
KGIYQTSNFRVQPTESIVRFPNITN

SEQ ID NO: 15019 - protein, 25 aa, synthetic construct
  REGION 1..25: note = Description of Artificial Sequence: Synthetic peptide
IYQTSNFRVQPTESIVRFPNITNLC

SEQ ID NO: 15020 - protein, 25 aa, synthetic construct
  REGION 1..25: note = Description of Artificial Sequence: Synthetic peptide
YQTSNFRVQPTESIVRFPNITNLCP

SEQ ID NO: 15021 - protein, 25 aa, synthetic construct
  REGION 1..25: note = Description of Artificial Sequence: Synthetic peptide
GIYQTSNFRVQPTESIVRFPNITNL

SEQ ID NO: 15022 - protein, 25 aa, synthetic construct
  REGION 1..25: note = Description of Artificial Sequence: Synthetic peptide
VTALRANSAVKLQNNELSPVALRQM

SEQ ID NO: 15023 - protein, 25 aa, synthetic construct
  REGION 1..25: note = Description of Artificial Sequence: Synthetic peptide
AVHFISNSWLMWLIINLVQMAPISA

SEQ ID NO: 15024 - protein, 25 aa, synthetic construct
  REGION 1..25: note = Description of Artificial Sequence: Synthetic peptide
TFYLTNDVSFLAHIQWMVMFTPLVP

SEQ ID NO: 15025 - protein, 25 aa, synthetic construct
  REGION 1..25: note = Description of Artificial Sequence: Synthetic peptide
DPSRILGAGCFVDDIVKTDGTLMIE

SEQ ID NO: 15026 - protein, 25 aa, synthetic construct
  REGION 1..25: note = Description of Artificial Sequence: Synthetic peptide
EPEYFNSVCRLMKTIGPDMFLGTCR

SEQ ID NO: 15027 - protein, 25 aa, synthetic construct
  REGION 1..25: note = Description of Artificial Sequence: Synthetic peptide
LEPEYFNSVCRLMKTIGPDMFLGTC

SEQ ID NO: 15028 - protein, 25 aa, synthetic construct
  REGION 1..25: note = Description of Artificial Sequence: Synthetic peptide
SEDKRAKVTSAMQTMLFTMLRKLDN

SEQ ID NO: 15029 - protein, 25 aa, synthetic construct
  REGION 1..25: note = Description of Artificial Sequence: Synthetic peptide
GTCRRCPAEIVDTVSALVYDNKLKA

SEQ ID NO: 15030 - protein, 25 aa, synthetic construct
  REGION 1..25: note = Description of Artificial Sequence: Synthetic peptide
LGTCRRCPAEIVDTVSALVYDNKLK

SEQ ID NO: 15031 - protein, 25 aa, synthetic construct
  REGION 1..25: note = Description of Artificial Sequence: Synthetic peptide
TCRRCPAEIVDTVSALVYDNKLKAH

SEQ ID NO: 15032 - protein, 25 aa, synthetic construct
  REGION 1..25: note = Description of Artificial Sequence: Synthetic peptide
CRRCPAEIVDTVSALVYDNKLKAHK

SEQ ID NO: 15033 - protein, 25 aa, synthetic construct
  REGION 1..25: note = Description of Artificial Sequence: Synthetic peptide
YDYCIPYNSVTSSIVITSGDGTTSP

SEQ ID NO: 15034 - protein, 25 aa, synthetic construct
  REGION 1..25: note = Description of Artificial Sequence: Synthetic peptide
NCYDYCIPYNSVTSSIVITSGDGTT

SEQ ID NO: 15035 - protein, 25 aa, synthetic construct
  REGION 1..25: note = Description of Artificial Sequence: Synthetic peptide
CYDYCIPYNSVTSSIVITSGDGTTS

SEQ ID NO: 15036 - protein, 25 aa, synthetic construct
  REGION 1..25: note = Description of Artificial Sequence: Synthetic peptide
DYCIPYNSVTSSIVITSGDGTTSPI

SEQ ID NO: 15037 - protein, 25 aa, synthetic construct
  REGION 1..25: note = Description of Artificial Sequence: Synthetic peptide
TNCYDYCIPYNSVTSSIVITSGDGT

SEQ ID NO: 15038 - protein, 25 aa, synthetic construct
  REGION 1..25: note = Description of Artificial Sequence: Synthetic peptide
YCIPYNSVTSSIVITSGDGTTSPIS

SEQ ID NO: 15039 - protein, 25 aa, synthetic construct
  REGION 1..25: note = Description of Artificial Sequence: Synthetic peptide
IQKEIDRLNEVAKNLNESLIDLQEL

SEQ ID NO: 15040 - protein, 25 aa, synthetic construct
  REGION 1..25: note = Description of Artificial Sequence: Synthetic peptide
QKEIDRLNEVAKNLNESLIDLQELG

SEQ ID NO: 15041 - protein, 25 aa, synthetic construct
  REGION 1..25: note = Description of Artificial Sequence: Synthetic peptide
NIQKEIDRLNEVAKNLNESLIDLQE

SEQ ID NO: 15042 - protein, 25 aa, synthetic construct
  REGION 1..25: note = Description of Artificial Sequence: Synthetic peptide
KDATPSDFVRATATIPIQASLPFGW

SEQ ID NO: 15043 - protein, 25 aa, synthetic construct
  REGION 1..25: note = Description of Artificial Sequence: Synthetic peptide
IKDATPSDFVRATATIPIQASLPFG

SEQ ID NO: 15044 - protein, 25 aa, synthetic construct
  REGION 1..25: note = Description of Artificial Sequence: Synthetic peptide
DATPSDFVRATATIPIQASLPFGWL

SEQ ID NO: 15045 - protein, 25 aa, synthetic construct
  REGION 1..25: note = Description of Artificial Sequence: Synthetic peptide
DPAMHAASGNLLLDKRTTCFSVAAL

SEQ ID NO: 15046 - protein, 25 aa, synthetic construct
  REGION 1..25: note = Description of Artificial Sequence: Synthetic peptide
AADPAMHAASGNLLLDKRTTCFSVA

SEQ ID NO: 15047 - protein, 25 aa, synthetic construct
  REGION 1..25: note = Description of Artificial Sequence: Synthetic peptide
ADPAMHAASGNLLLDKRTTCFSVAA

SEQ ID NO: 15048 - protein, 25 aa, synthetic construct
  REGION 1..25: note = Description of Artificial Sequence: Synthetic peptide
ADQLTPTWRVYSTGSNVFQTRAGCL

SEQ ID NO: 15049 - protein, 25 aa, synthetic construct
  REGION 1..25: note = Description of Artificial Sequence: Synthetic peptide
DQLTPTWRVYSTGSNVFQTRAGCLI

SEQ ID NO: 15050 - protein, 25 aa, synthetic construct
  REGION 1..25: note = Description of Artificial Sequence: Synthetic peptide
MSKFPLKLRGTAVMSLKEGQINDMI

SEQ ID NO: 15051 - protein, 25 aa, synthetic construct
  REGION 1..25: note = Description of Artificial Sequence: Synthetic peptide
FDMSKFPLKLRGTAVMSLKEGQIND

SEQ ID NO: 15052 - protein, 25 aa, synthetic construct
  REGION 1..25: note = Description of Artificial Sequence: Synthetic peptide
DMSKFPLKLRGTAVMSLKEGQINDM

SEQ ID NO: 15053 - protein, 25 aa, synthetic construct
  REGION 1..25: note = Description of Artificial Sequence: Synthetic peptide
SKFPLKLRGTAVMSLKEGQINDMIL

SEQ ID NO: 15054 - protein, 25 aa, synthetic construct
  REGION 1..25: note = Description of Artificial Sequence: Synthetic peptide
VSEETGTLIVNSVLLFLAFVVFLLV

SEQ ID NO: 15055 - protein, 25 aa, synthetic construct
  REGION 1..25: note = Description of Artificial Sequence: Synthetic peptide
FVSEETGTLIVNSVLLFLAFVVFLL

SEQ ID NO: 15056 - protein, 25 aa, synthetic construct
  REGION 1..25: note = Description of Artificial Sequence: Synthetic peptide
SFVSEETGTLIVNSVLLFLAFVVFL

SEQ ID NO: 15057 - protein, 25 aa, synthetic construct
  REGION 1..25: note = Description of Artificial Sequence: Synthetic peptide
TDLTKGPHEFCSQHTMLVKQGDDYV

SEQ ID NO: 15058 - protein, 25 aa, synthetic construct
  REGION 1..25: note = Description of Artificial Sequence: Synthetic peptide
TKGPHEFCSQHTMLVKQGDDYVYLP

SEQ ID NO: 15059 - protein, 25 aa, synthetic construct
  REGION 1..25: note = Description of Artificial Sequence: Synthetic peptide
DLTKGPHEFCSQHTMLVKQGDDYVY

SEQ ID NO: 15060 - protein, 25 aa, synthetic construct
  REGION 1..25: note = Description of Artificial Sequence: Synthetic peptide
ETDLTKGPHEFCSQHTMLVKQGDDY

SEQ ID NO: 15061 - protein, 25 aa, synthetic construct
  REGION 1..25: note = Description of Artificial Sequence: Synthetic peptide
LTKGPHEFCSQHTMLVKQGDDYVYL

SEQ ID NO: 15062 - protein, 25 aa, synthetic construct
  REGION 1..25: note = Description of Artificial Sequence: Synthetic peptide
LWVYKQFDTYNLWNTFTRLQSLENV

SEQ ID NO: 15063 - protein, 25 aa, synthetic construct
  REGION 1..25: note = Description of Artificial Sequence: Synthetic peptide
YVTQQLIRAAEIRASANLAATKMSE

SEQ ID NO: 15064 - protein, 25 aa, synthetic construct
  REGION 1..25: note = Description of Artificial Sequence: Synthetic peptide
LQTYVTQQLIRAAEIRASANLAATK

SEQ ID NO: 15065 - protein, 25 aa, synthetic construct
  REGION 1..25: note = Description of Artificial Sequence: Synthetic peptide
TYVTQQLIRAAEIRASANLAATKMS

SEQ ID NO: 15066 - protein, 25 aa, synthetic construct
  REGION 1..25: note = Description of Artificial Sequence: Synthetic peptide
QTYVTQQLIRAAEIRASANLAATKM

SEQ ID NO: 15067 - protein, 25 aa, synthetic construct
  REGION 1..25: note = Description of Artificial Sequence: Synthetic peptide
AGLPYGANKDGIIWVATEGALNTPK

SEQ ID NO: 15068 - protein, 25 aa, synthetic construct
  REGION 1..25: note = Description of Artificial Sequence: Synthetic peptide
YSLRLIDAMMFTSDLATNNLVVMAY

SEQ ID NO: 15069 - protein, 25 aa, synthetic construct
  REGION 1..25: note = Description of Artificial Sequence: Synthetic peptide
QYSLRLIDAMMFTSDLATNNLVVMA

SEQ ID NO: 15070 - protein, 25 aa, synthetic construct
  REGION 1..25: note = Description of Artificial Sequence: Synthetic peptide
LLVYAADPAMHAASGNLLLDKRTTC

SEQ ID NO: 15071 - protein, 25 aa, synthetic construct
  REGION 1..25: note = Description of Artificial Sequence: Synthetic peptide
LVYAADPAMHAASGNLLLDKRTTCF

SEQ ID NO: 15072 - protein, 25 aa, synthetic construct
  REGION 1..25: note = Description of Artificial Sequence: Synthetic peptide
DTVSALVYDNKLKAHKDKSAQCFKM

SEQ ID NO: 15073 - protein, 25 aa, synthetic construct
  REGION 1..25: note = Description of Artificial Sequence: Synthetic peptide
VHVVDGCNSSTCMMCYKRNRATRVE

SEQ ID NO: 15074 - protein, 25 aa, synthetic construct
  REGION 1..25: note = Description of Artificial Sequence: Synthetic peptide
LATNNLVVMAYITGGVVQLTSQWLT

SEQ ID NO: 15075 - protein, 25 aa, synthetic construct
  REGION 1..25: note = Description of Artificial Sequence: Synthetic peptide
TRLQSLENVAFNVVNKGHFDGQQGE

SEQ ID NO: 15076 - protein, 25 aa, synthetic construct
  REGION 1..25: note = Description of Artificial Sequence: Synthetic peptide
YGIATVREVLSDRELHLSWEVGKPR

SEQ ID NO: 15077 - protein, 25 aa, synthetic construct
  REGION 1..25: note = Description of Artificial Sequence: Synthetic peptide
GIATVREVLSDRELHLSWEVGKPRP

SEQ ID NO: 15078 - protein, 25 aa, synthetic construct
  REGION 1..25: note = Description of Artificial Sequence: Synthetic peptide
IATVREVLSDRELHLSWEVGKPRPP

SEQ ID NO: 15079 - protein, 25 aa, synthetic construct
  REGION 1..25: note = Description of Artificial Sequence: Synthetic peptide
LDDFVEIIKSQDLSVVSKVVKVTID

SEQ ID NO: 15080 - protein, 25 aa, synthetic construct
  REGION 1..25: note = Description of Artificial Sequence: Synthetic peptide
PANSTVLSFCAFAVDAAKAYKDYLA

SEQ ID NO: 15081 - protein, 25 aa, synthetic construct
  REGION 1..25: note = Description of Artificial Sequence: Synthetic peptide
CTERLKLFAAETLKATEETFKLSYG

SEQ ID NO: 15082 - protein, 25 aa, synthetic construct
  REGION 1..25: note = Description of Artificial Sequence: Synthetic peptide
TCTERLKLFAAETLKATEETFKLSY

SEQ ID NO: 15083 - protein, 25 aa, synthetic construct
  REGION 1..25: note = Description of Artificial Sequence: Synthetic peptide
VGGNYNYLYRLFRKSNLKPFERDIS

SEQ ID NO: 15084 - protein, 25 aa, synthetic construct
  REGION 1..25: note = Description of Artificial Sequence: Synthetic peptide
SKVGGNYNYLYRLFRKSNLKPFERD

SEQ ID NO: 15085 - protein, 25 aa, synthetic construct
  REGION 1..25: note = Description of Artificial Sequence: Synthetic peptide
DSKVGGNYNYLYRLFRKSNLKPFER

SEQ ID NO: 15086 - protein, 25 aa, synthetic construct
  REGION 1..25: note = Description of Artificial Sequence: Synthetic peptide
LDSKVGGNYNYLYRLFRKSNLKPFE

SEQ ID NO: 15087 - protein, 25 aa, synthetic construct
  REGION 1..25: note = Description of Artificial Sequence: Synthetic peptide
KVGGNYNYLYRLFRKSNLKPFERDI

SEQ ID NO: 15088 - protein, 25 aa, synthetic construct
  REGION 1..25: note = Description of Artificial Sequence: Synthetic peptide
NLDSKVGGNYNYLYRLFRKSNLKPF

SEQ ID NO: 15089 - protein, 25 aa, synthetic construct
  REGION 1..25: note = Description of Artificial Sequence: Synthetic peptide
PLYAFASEAARVVRSIFSRTLETAQ

SEQ ID NO: 15090 - protein, 25 aa, synthetic construct
  REGION 1..25: note = Description of Artificial Sequence: Synthetic peptide
LGSLAATVRLQAGNATEVPANSTVL

SEQ ID NO: 15091 - protein, 25 aa, synthetic construct
  REGION 1..25: note = Description of Artificial Sequence: Synthetic peptide
IQRKYKGIKIQEGVVDYGARFYFYT

SEQ ID NO: 15092 - protein, 25 aa, synthetic construct
  REGION 1..25: note = Description of Artificial Sequence: Synthetic peptide
KSVYYTSNPTTFHLDGEVITFDNLK

SEQ ID NO: 15093 - protein, 25 aa, synthetic construct
  REGION 1..25: note = Description of Artificial Sequence: Synthetic peptide
VRTIKVFTTVDNINLHTQVVDMSMT

SEQ ID NO: 15094 - protein, 25 aa, synthetic construct
  REGION 1..25: note = Description of Artificial Sequence: Synthetic peptide
DQVILLNKHIDAYKTFPPTEPKKDK

SEQ ID NO: 15095 - protein, 25 aa, synthetic construct
  REGION 1..25: note = Description of Artificial Sequence: Synthetic peptide
NALLSTDGNKIADKYVRNLQHRLYE

SEQ ID NO: 15096 - protein, 25 aa, synthetic construct
  REGION 1..25: note = Description of Artificial Sequence: Synthetic peptide
ARDGCVPLNIIPLTTAAKLMVVIPD

SEQ ID NO: 15097 - protein, 25 aa, synthetic construct
  REGION 1..25: note = Description of Artificial Sequence: Synthetic peptide
PLTTAAKLMVVIPDYNTYKNTCDGT

SEQ ID NO: 15098 - protein, 25 aa, synthetic construct
  REGION 1..25: note = Description of Artificial Sequence: Synthetic peptide
TFLKKDAPYIVGDVVQEGVLTAVVI

SEQ ID NO: 15099 - protein, 25 aa, synthetic construct
  REGION 1..25: note = Description of Artificial Sequence: Synthetic peptide
ITFLKKDAPYIVGDVVQEGVLTAVV

SEQ ID NO: 15100 - protein, 25 aa, synthetic construct
  REGION 1..25: note = Description of Artificial Sequence: Synthetic peptide
LKKDAPYIVGDVVQEGVLTAVVIPT

SEQ ID NO: 15101 - protein, 25 aa, synthetic construct
  REGION 1..25: note = Description of Artificial Sequence: Synthetic peptide
KKDAPYIVGDVVQEGVLTAVVIPTK

SEQ ID NO: 15102 - protein, 25 aa, synthetic construct
  REGION 1..25: note = Description of Artificial Sequence: Synthetic peptide
LTENLLLYIDINGNLHPDSATLVSD

SEQ ID NO: 15103 - protein, 25 aa, synthetic construct
  REGION 1..25: note = Description of Artificial Sequence: Synthetic peptide
FLTENLLLYIDINGNLHPDSATLVS

SEQ ID NO: 15104 - protein, 25 aa, synthetic construct
  REGION 1..25: note = Description of Artificial Sequence: Synthetic peptide
GKPVPYCYDTNVLEGSVAYESLRPD

SEQ ID NO: 15105 - protein, 25 aa, synthetic construct
  REGION 1..25: note = Description of Artificial Sequence: Synthetic peptide
LNSIIKTIQPRVEKKKLDGFMGRIR

SEQ ID NO: 15106 - protein, 25 aa, synthetic construct
  REGION 1..25: note = Description of Artificial Sequence: Synthetic peptide
LGRCDIKDLPKEITVATSRTLSYYK

SEQ ID NO: 15107 - protein, 25 aa, synthetic construct
  REGION 1..25: note = Description of Artificial Sequence: Synthetic peptide
KRGDKSVYYTSNPTTFHLDGEVITF

SEQ ID NO: 15108 - protein, 25 aa, synthetic construct
  REGION 1..25: note = Description of Artificial Sequence: Synthetic peptide
LKRGDKSVYYTSNPTTFHLDGEVIT

SEQ ID NO: 15109 - protein, 25 aa, synthetic construct
  REGION 1..25: note = Description of Artificial Sequence: Synthetic peptide
GSFCTQLNRALTGIAVEQDKNTQEV

SEQ ID NO: 15110 - protein, 25 aa, synthetic construct
  REGION 1..25: note = Description of Artificial Sequence: Synthetic peptide
QYGSFCTQLNRALTGIAVEQDKNTQ

SEQ ID NO: 15111 - protein, 25 aa, synthetic construct
  REGION 1..25: note = Description of Artificial Sequence: Synthetic peptide
YGSFCTQLNRALTGIAVEQDKNTQE

SEQ ID NO: 15112 - protein, 25 aa, synthetic construct
  REGION 1..25: note = Description of Artificial Sequence: Synthetic peptide
TYNLWNTFTRLQSLENVAFNVVNKG

SEQ ID NO: 15113 - protein, 25 aa, synthetic construct
  REGION 1..25: note = Description of Artificial Sequence: Synthetic peptide
VTSNYSGVVTTVMFLARGIVFMCVE

SEQ ID NO: 15114 - protein, 25 aa, synthetic construct
  REGION 1..25: note = Description of Artificial Sequence: Synthetic peptide
ANKDGIIWVATEGALNTPKDHIGTR

SEQ ID NO: 15115 - protein, 25 aa, synthetic construct
  REGION 1..25: note = Description of Artificial Sequence: Synthetic peptide
HFSMMILSDDAVVCFNSTYASQGLV

SEQ ID NO: 15116 - protein, 25 aa, synthetic construct
  REGION 1..25: note = Description of Artificial Sequence: Synthetic peptide
FSMMILSDDAVVCFNSTYASQGLVA

SEQ ID NO: 15117 - protein, 25 aa, synthetic construct
  REGION 1..25: note = Description of Artificial Sequence: Synthetic peptide
TREEAIRHVRAWIGFDVEGCHATRE

SEQ ID NO: 15118 - protein, 25 aa, synthetic construct
  REGION 1..25: note = Description of Artificial Sequence: Synthetic peptide
QTSNFRVQPTESIVRFPNITNLCPF

SEQ ID NO: 15119 - protein, 25 aa, synthetic construct
  REGION 1..25: note = Description of Artificial Sequence: Synthetic peptide
TAAKLMVVIPDYNTYKNTCDGTTFT

SEQ ID NO: 15120 - protein, 25 aa, synthetic construct
  REGION 1..25: note = Description of Artificial Sequence: Synthetic peptide
RVCTNYMPYFFTLLLQLCTFTRSTN

SEQ ID NO: 15121 - protein, 25 aa, synthetic construct
  REGION 1..25: note = Description of Artificial Sequence: Synthetic peptide
NRVCTNYMPYFFTLLLQLCTFTRST

SEQ ID NO: 15122 - protein, 25 aa, synthetic construct
  REGION 1..25: note = Description of Artificial Sequence: Synthetic peptide
VCTNYMPYFFTLLLQLCTFTRSTNS

SEQ ID NO: 15123 - protein, 25 aa, synthetic construct
  REGION 1..25: note = Description of Artificial Sequence: Synthetic peptide
SNYSGVVTTVMFLARGIVFMCVEYC

SEQ ID NO: 15124 - protein, 25 aa, synthetic construct
  REGION 1..25: note = Description of Artificial Sequence: Synthetic peptide
NYSGVVTTVMFLARGIVFMCVEYCP

SEQ ID NO: 15125 - protein, 25 aa, synthetic construct
  REGION 1..25: note = Description of Artificial Sequence: Synthetic peptide
LGSLIYSTAALGVLMSNLGMPSYCT

SEQ ID NO: 15126 - protein, 25 aa, synthetic construct
  REGION 1..25: note = Description of Artificial Sequence: Synthetic peptide
VCLGSLIYSTAALGVLMSNLGMPSY

SEQ ID NO: 15127 - protein, 25 aa, synthetic construct
  REGION 1..25: note = Description of Artificial Sequence: Synthetic peptide
CLGSLIYSTAALGVLMSNLGMPSYC

SEQ ID NO: 15128 - protein, 25 aa, synthetic construct
  REGION 1..25: note = Description of Artificial Sequence: Synthetic peptide
QEKNFTTAPAICHDGKAHFPREGVF

SEQ ID NO: 15129 - protein, 25 aa, synthetic construct
  REGION 1..25: note = Description of Artificial Sequence: Synthetic peptide
AQEKNFTTAPAICHDGKAHFPREGV

SEQ ID NO: 15130 - protein, 25 aa, synthetic construct
  REGION 1..25: note = Description of Artificial Sequence: Synthetic peptide
GAIKLDDKDPNFKDQVILLNKHIDA

SEQ ID NO: 15131 - protein, 25 aa, synthetic construct
  REGION 1..25: note = Description of Artificial Sequence: Synthetic peptide
VESCGNFKVTKGKAKKGAWNIGEQK

SEQ ID NO: 15132 - protein, 25 aa, synthetic construct
  REGION 1..25: note = Description of Artificial Sequence: Synthetic peptide
QIVESCGNFKVTKGKAKKGAWNIGE

SEQ ID NO: 15133 - protein, 25 aa, synthetic construct
  REGION 1..25: note = Description of Artificial Sequence: Synthetic peptide
IVESCGNFKVTKGKAKKGAWNIGEQ

SEQ ID NO: 15134 - protein, 25 aa, synthetic construct
  REGION 1..25: note = Description of Artificial Sequence: Synthetic peptide
PTDQSSYIVDSVTVKNGSIHLYFDK

SEQ ID NO: 15135 - protein, 25 aa, synthetic construct
  REGION 1..25: note = Description of Artificial Sequence: Synthetic peptide
EMLAKALRKVPTDNYITTYPGQGLN

SEQ ID NO: 15136 - protein, 25 aa, synthetic construct
  REGION 1..25: note = Description of Artificial Sequence: Synthetic peptide
TLADAGFIKQYGDCLGDIAARDLIC

SEQ ID NO: 15137 - protein, 25 aa, synthetic construct
  REGION 1..25: note = Description of Artificial Sequence: Synthetic peptide
LADAGFIKQYGDCLGDIAARDLICA

SEQ ID NO: 15138 - protein, 25 aa, synthetic construct
  REGION 1..25: note = Description of Artificial Sequence: Synthetic peptide
ADAGFIKQYGDCLGDIAARDLICAQ

SEQ ID NO: 15139 - protein, 25 aa, synthetic construct
  REGION 1..25: note = Description of Artificial Sequence: Synthetic peptide
TYVPAQEKNFTTAPAICHDGKAHFP

SEQ ID NO: 15140 - protein, 25 aa, synthetic construct
  REGION 1..25: note = Description of Artificial Sequence: Synthetic peptide
VTYVPAQEKNFTTAPAICHDGKAHF

SEQ ID NO: 15141 - protein, 25 aa, synthetic construct
  REGION 1..25: note = Description of Artificial Sequence: Synthetic peptide
HVTYVPAQEKNFTTAPAICHDGKAH

SEQ ID NO: 15142 - protein, 25 aa, synthetic construct
  REGION 1..25: note = Description of Artificial Sequence: Synthetic peptide
SRELKVTFFPDLNGDVVAIDYKHYT

SEQ ID NO: 15143 - protein, 25 aa, synthetic construct
  REGION 1..25: note = Description of Artificial Sequence: Synthetic peptide
ASRELKVTFFPDLNGDVVAIDYKHY

SEQ ID NO: 15144 - protein, 25 aa, synthetic construct
  REGION 1..25: note = Description of Artificial Sequence: Synthetic peptide
NAQALNTLVKQLSSNFGAISSVLND

SEQ ID NO: 15145 - protein, 25 aa, synthetic construct
  REGION 1..25: note = Description of Artificial Sequence: Synthetic peptide
QNAQALNTLVKQLSSNFGAISSVLN

SEQ ID NO: 15146 - protein, 25 aa, synthetic construct
  REGION 1..25: note = Description of Artificial Sequence: Synthetic peptide
NPTDQSSYIVDSVTVKNGSIHLYFD

SEQ ID NO: 15147 - protein, 25 aa, synthetic construct
  REGION 1..25: note = Description of Artificial Sequence: Synthetic peptide
INPTDQSSYIVDSVTVKNGSIHLYF

SEQ ID NO: 15148 - protein, 25 aa, synthetic construct
  REGION 1..25: note = Description of Artificial Sequence: Synthetic peptide
PINPTDQSSYIVDSVTVKNGSIHLY

SEQ ID NO: 15149 - protein, 25 aa, synthetic construct
  REGION 1..25: note = Description of Artificial Sequence: Synthetic peptide
KRPINPTDQSSYIVDSVTVKNGSIH

SEQ ID NO: 15150 - protein, 25 aa, synthetic construct
  REGION 1..25: note = Description of Artificial Sequence: Synthetic peptide
RPINPTDQSSYIVDSVTVKNGSIHL

SEQ ID NO: 15151 - protein, 25 aa, synthetic construct
  REGION 1..25: note = Description of Artificial Sequence: Synthetic peptide
AALGVLMSNLGMPSYCTGYREGYLN

SEQ ID NO: 15152 - protein, 25 aa, synthetic construct
  REGION 1..25: note = Description of Artificial Sequence: Synthetic peptide
LGVLMSNLGMPSYCTGYREGYLNST

SEQ ID NO: 15153 - protein, 25 aa, synthetic construct
  REGION 1..25: note = Description of Artificial Sequence: Synthetic peptide
ALGVLMSNLGMPSYCTGYREGYLNS

SEQ ID NO: 15154 - protein, 25 aa, synthetic construct
  REGION 1..25: note = Description of Artificial Sequence: Synthetic peptide
IRKSNHNFLVQAGNVQLRVIGHSMQ

SEQ ID NO: 15155 - protein, 25 aa, synthetic construct
  REGION 1..25: note = Description of Artificial Sequence: Synthetic peptide
YTTTIKPVTYKLDGVVCTEIDPKLD

SEQ ID NO: 15156 - protein, 25 aa, synthetic construct
  REGION 1..25: note = Description of Artificial Sequence: Synthetic peptide
SYTTTIKPVTYKLDGVVCTEIDPKL

SEQ ID NO: 15157 - protein, 25 aa, synthetic construct
  REGION 1..25: note = Description of Artificial Sequence: Synthetic peptide
TTTIKPVTYKLDGVVCTEIDPKLDN

SEQ ID NO: 15158 - protein, 25 aa, synthetic construct
  REGION 1..25: note = Description of Artificial Sequence: Synthetic peptide
TFSSTFNVPMEKLKTLVATAEAELA

SEQ ID NO: 15159 - protein, 25 aa, synthetic construct
  REGION 1..25: note = Description of Artificial Sequence: Synthetic peptide
GVSFSTFEEAALCTFLLNKEMYLKL

SEQ ID NO: 15160 - protein, 25 aa, synthetic construct
  REGION 1..25: note = Description of Artificial Sequence: Synthetic peptide
YQCAMRPNFTIKGSFLNGSCGSVGF

SEQ ID NO: 15161 - protein, 25 aa, synthetic construct
  REGION 1..25: note = Description of Artificial Sequence: Synthetic peptide
VYQCAMRPNFTIKGSFLNGSCGSVG

SEQ ID NO: 15162 - protein, 25 aa, synthetic construct
  REGION 1..25: note = Description of Artificial Sequence: Synthetic peptide
CAMRPNFTIKGSFLNGSCGSVGFNI

SEQ ID NO: 15163 - protein, 25 aa, synthetic construct
  REGION 1..25: note = Description of Artificial Sequence: Synthetic peptide
AMRPNFTIKGSFLNGSCGSVGFNID

SEQ ID NO: 15164 - protein, 25 aa, synthetic construct
  REGION 1..25: note = Description of Artificial Sequence: Synthetic peptide
QCAMRPNFTIKGSFLNGSCGSVGFN

SEQ ID NO: 15165 - protein, 25 aa, synthetic construct
  REGION 1..25: note = Description of Artificial Sequence: Synthetic peptide
MRPNFTIKGSFLNGSCGSVGFNIDY

SEQ ID NO: 15166 - protein, 25 aa, synthetic construct
  REGION 1..25: note = Description of Artificial Sequence: Synthetic peptide
GPTYLDGADVTKIKPHNSHEGKTFY

SEQ ID NO: 15167 - protein, 25 aa, synthetic construct
  REGION 1..25: note = Description of Artificial Sequence: Synthetic peptide
DASGKPVPYCYDTNVLEGSVAYESL

SEQ ID NO: 15168 - protein, 25 aa, synthetic construct
  REGION 1..25: note = Description of Artificial Sequence: Synthetic peptide
FKDASGKPVPYCYDTNVLEGSVAYE

SEQ ID NO: 15169 - protein, 25 aa, synthetic construct
  REGION 1..25: note = Description of Artificial Sequence: Synthetic peptide
IFKDASGKPVPYCYDTNVLEGSVAY

SEQ ID NO: 15170 - protein, 25 aa, synthetic construct
  REGION 1..25: note = Description of Artificial Sequence: Synthetic peptide
KDASGKPVPYCYDTNVLEGSVAYES

SEQ ID NO: 15171 - protein, 25 aa, synthetic construct
  REGION 1..25: note = Description of Artificial Sequence: Synthetic peptide
LQKEKVNINIVGDFKLNEEIAIILA

SEQ ID NO: 15172 - protein, 25 aa, synthetic construct
  REGION 1..25: note = Description of Artificial Sequence: Synthetic peptide
ILQKEKVNINIVGDFKLNEEIAIIL

SEQ ID NO: 15173 - protein, 25 aa, synthetic construct
  REGION 1..25: note = Description of Artificial Sequence: Synthetic peptide
DTSLSGFKLKDCVMYASAVVLLILM

SEQ ID NO: 15174 - protein, 25 aa, synthetic construct
  REGION 1..25: note = Description of Artificial Sequence: Synthetic peptide
VDTSLSGFKLKDCVMYASAVVLLIL

SEQ ID NO: 15175 - protein, 25 aa, synthetic construct
  REGION 1..25: note = Description of Artificial Sequence: Synthetic peptide
NTFSSTFNVPMEKLKTLVATAEAEL

SEQ ID NO: 15176 - protein, 25 aa, synthetic construct
  REGION 1..25: note = Description of Artificial Sequence: Synthetic peptide
LLSAGIFGADPIHSLRVCVDTVRTN

SEQ ID NO: 15177 - protein, 25 aa, synthetic construct
  REGION 1..25: note = Description of Artificial Sequence: Synthetic peptide
LSAGIFGADPIHSLRVCVDTVRTNV

SEQ ID NO: 15178 - protein, 25 aa, synthetic construct
  REGION 1..25: note = Description of Artificial Sequence: Synthetic peptide
AGIFGADPIHSLRVCVDTVRTNVYL

SEQ ID NO: 15179 - protein, 25 aa, synthetic construct
  REGION 1..25: note = Description of Artificial Sequence: Synthetic peptide
SAGIFGADPIHSLRVCVDTVRTNVY

SEQ ID NO: 15180 - protein, 25 aa, synthetic construct
  REGION 1..25: note = Description of Artificial Sequence: Synthetic peptide
DISASIVAGGIVAIVVTCLAYYFMR

SEQ ID NO: 15181 - protein, 25 aa, synthetic construct
  REGION 1..25: note = Description of Artificial Sequence: Synthetic peptide
APLLSAGIFGADPIHSLRVCVDTVR

SEQ ID NO: 15182 - protein, 25 aa, synthetic construct
  REGION 1..25: note = Description of Artificial Sequence: Synthetic peptide
PLLSAGIFGADPIHSLRVCVDTVRT

SEQ ID NO: 15183 - protein, 25 aa, synthetic construct
  REGION 1..25: note = Description of Artificial Sequence: Synthetic peptide
DFGDFIQTTPGSGVPVVDSYYSLLM

SEQ ID NO: 15184 - protein, 25 aa, synthetic construct
  REGION 1..25: note = Description of Artificial Sequence: Synthetic peptide
YDFGDFIQTTPGSGVPVVDSYYSLL

SEQ ID NO: 15185 - protein, 25 aa, synthetic construct
  REGION 1..25: note = Description of Artificial Sequence: Synthetic peptide
NWYDFGDFIQTTPGSGVPVVDSYYS

SEQ ID NO: 15186 - protein, 25 aa, synthetic construct
  REGION 1..25: note = Description of Artificial Sequence: Synthetic peptide
GNWYDFGDFIQTTPGSGVPVVDSYY

SEQ ID NO: 15187 - protein, 25 aa, synthetic construct
  REGION 1..25: note = Description of Artificial Sequence: Synthetic peptide
WYDFGDFIQTTPGSGVPVVDSYYSL

SEQ ID NO: 15188 - protein, 25 aa, synthetic construct
  REGION 1..25: note = Description of Artificial Sequence: Synthetic peptide
KEKVNINIVGDFKLNEEIAIILASF

SEQ ID NO: 15189 - protein, 25 aa, synthetic construct
  REGION 1..25: note = Description of Artificial Sequence: Synthetic peptide
KVNINIVGDFKLNEEIAIILASFSA

SEQ ID NO: 15190 - protein, 25 aa, synthetic construct
  REGION 1..25: note = Description of Artificial Sequence: Synthetic peptide
EKVNINIVGDFKLNEEIAIILASFS

SEQ ID NO: 15191 - protein, 25 aa, synthetic construct
  REGION 1..25: note = Description of Artificial Sequence: Synthetic peptide
KHTTCCSLSHRFYRLANECAQVLSE

SEQ ID NO: 15192 - protein, 25 aa, synthetic construct
  REGION 1..25: note = Description of Artificial Sequence: Synthetic peptide
DGVVQQLPETYFTQSRNLQEFKPRS

SEQ ID NO: 15193 - protein, 25 aa, synthetic construct
  REGION 1..25: note = Description of Artificial Sequence: Synthetic peptide
IDITFLKKDAPYIVGDVVQEGVLTA

SEQ ID NO: 15194 - protein, 25 aa, synthetic construct
  REGION 1..25: note = Description of Artificial Sequence: Synthetic peptide
DIDITFLKKDAPYIVGDVVQEGVLT

SEQ ID NO: 15195 - protein, 25 aa, synthetic construct
  REGION 1..25: note = Description of Artificial Sequence: Synthetic peptide
SKIITLKKRWQLALSKGVHFVCNLL

SEQ ID NO: 15196 - protein, 25 aa, synthetic construct
  REGION 1..25: note = Description of Artificial Sequence: Synthetic peptide
DDFTGCVIAWNSNNLDSKVGGNYNY

SEQ ID NO: 15197 - protein, 25 aa, synthetic construct
  REGION 1..25: note = Description of Artificial Sequence: Synthetic peptide
DFTGCVIAWNSNNLDSKVGGNYNYL

SEQ ID NO: 15198 - protein, 25 aa, synthetic construct
  REGION 1..25: note = Description of Artificial Sequence: Synthetic peptide
LSVCLGSLIYSTAALGVLMSNLGMP

SEQ ID NO: 15199 - protein, 25 aa, synthetic construct
  REGION 1..25: note = Description of Artificial Sequence: Synthetic peptide
LLLSVCLGSLIYSTAALGVLMSNLG

SEQ ID NO: 15200 - protein, 25 aa, synthetic construct
  REGION 1..25: note = Description of Artificial Sequence: Synthetic peptide
LLSVCLGSLIYSTAALGVLMSNLGM

SEQ ID NO: 15201 - protein, 25 aa, synthetic construct
  REGION 1..25: note = Description of Artificial Sequence: Synthetic peptide
SVCLGSLIYSTAALGVLMSNLGMPS

SEQ ID NO: 15202 - protein, 25 aa, synthetic construct
  REGION 1..25: note = Description of Artificial Sequence: Synthetic peptide
FLLLSVCLGSLIYSTAALGVLMSNL

SEQ ID NO: 15203 - protein, 25 aa, synthetic construct
  REGION 1..25: note = Description of Artificial Sequence: Synthetic peptide
WFLLLSVCLGSLIYSTAALGVLMSN

SEQ ID NO: 15204 - protein, 25 aa, synthetic construct
  REGION 1..25: note = Description of Artificial Sequence: Synthetic peptide
GMPSYCTGYREGYLNSTNVTIATYC

SEQ ID NO: 15205 - protein, 25 aa, synthetic construct
  REGION 1..25: note = Description of Artificial Sequence: Synthetic peptide
VAIHADQLTPTWRVYSTGSNVFQTR

SEQ ID NO: 15206 - protein, 25 aa, synthetic construct
  REGION 1..25: note = Description of Artificial Sequence: Synthetic peptide
AIHADQLTPTWRVYSTGSNVFQTRA

SEQ ID NO: 15207 - protein, 25 aa, synthetic construct
  REGION 1..25: note = Description of Artificial Sequence: Synthetic peptide
PVAIHADQLTPTWRVYSTGSNVFQT

SEQ ID NO: 15208 - protein, 25 aa, synthetic construct
  REGION 1..25: note = Description of Artificial Sequence: Synthetic peptide
QGMDNLACEDLKPVSEEVVENPTIQ

SEQ ID NO: 15209 - protein, 25 aa, synthetic construct
  REGION 1..25: note = Description of Artificial Sequence: Synthetic peptide
AYVNTFSSTFNVPMEKLKTLVATAE

SEQ ID NO: 15210 - protein, 25 aa, synthetic construct
  REGION 1..25: note = Description of Artificial Sequence: Synthetic peptide
YVNTFSSTFNVPMEKLKTLVATAEA

SEQ ID NO: 15211 - protein, 25 aa, synthetic construct
  REGION 1..25: note = Description of Artificial Sequence: Synthetic peptide
STSGRWVLNNDYYRSLPGVFCGVDA

SEQ ID NO: 15212 - protein, 25 aa, synthetic construct
  REGION 1..25: note = Description of Artificial Sequence: Synthetic peptide
DAAMQRKLEKMADQAMTQMYKQARS

SEQ ID NO: 15213 - protein, 25 aa, synthetic construct
  REGION 1..25: note = Description of Artificial Sequence: Synthetic peptide
EFDRDAAMQRKLEKMADQAMTQMYK

SEQ ID NO: 15214 - protein, 25 aa, synthetic construct
  REGION 1..25: note = Description of Artificial Sequence: Synthetic peptide
FDRDAAMQRKLEKMADQAMTQMYKQ

SEQ ID NO: 15215 - protein, 25 aa, synthetic construct
  REGION 1..25: note = Description of Artificial Sequence: Synthetic peptide
DRDAAMQRKLEKMADQAMTQMYKQA

SEQ ID NO: 15216 - protein, 25 aa, synthetic construct
  REGION 1..25: note = Description of Artificial Sequence: Synthetic peptide
RDAAMQRKLEKMADQAMTQMYKQAR

SEQ ID NO: 15217 - protein, 25 aa, synthetic construct
  REGION 1..25: note = Description of Artificial Sequence: Synthetic peptide
TVKNGSIHLYFDKAGQKTYERHSLS

SEQ ID NO: 15218 - protein, 25 aa, synthetic construct
  REGION 1..25: note = Description of Artificial Sequence: Synthetic peptide
VKNGSIHLYFDKAGQKTYERHSLSH

SEQ ID NO: 15219 - protein, 25 aa, synthetic construct
  REGION 1..25: note = Description of Artificial Sequence: Synthetic peptide
KNGSIHLYFDKAGQKTYERHSLSHF

SEQ ID NO: 15220 - protein, 25 aa, synthetic construct
  REGION 1..25: note = Description of Artificial Sequence: Synthetic peptide
SVTVKNGSIHLYFDKAGQKTYERHS

SEQ ID NO: 15221 - protein, 25 aa, synthetic construct
  REGION 1..25: note = Description of Artificial Sequence: Synthetic peptide
VTVKNGSIHLYFDKAGQKTYERHSL

SEQ ID NO: 15222 - protein, 25 aa, synthetic construct
  REGION 1..25: note = Description of Artificial Sequence: Synthetic peptide
IVDSVTVKNGSIHLYFDKAGQKTYE

SEQ ID NO: 15223 - protein, 25 aa, synthetic construct
  REGION 1..25: note = Description of Artificial Sequence: Synthetic peptide
VDSVTVKNGSIHLYFDKAGQKTYER

SEQ ID NO: 15224 - protein, 25 aa, synthetic construct
  REGION 1..25: note = Description of Artificial Sequence: Synthetic peptide
SYIVDSVTVKNGSIHLYFDKAGQKT

SEQ ID NO: 15225 - protein, 25 aa, synthetic construct
  REGION 1..25: note = Description of Artificial Sequence: Synthetic peptide
YIVDSVTVKNGSIHLYFDKAGQKTY

SEQ ID NO: 15226 - protein, 25 aa, synthetic construct
  REGION 1..25: note = Description of Artificial Sequence: Synthetic peptide
TLEETKFLTENLLLYIDINGNLHPD

SEQ ID NO: 15227 - protein, 25 aa, synthetic construct
  REGION 1..25: note = Description of Artificial Sequence: Synthetic peptide
LEETKFLTENLLLYIDINGNLHPDS

SEQ ID NO: 15228 - protein, 25 aa, synthetic construct
  REGION 1..25: note = Description of Artificial Sequence: Synthetic peptide
ALCTFLLNKEMYLKLRSDVLLPLTQ

SEQ ID NO: 15229 - protein, 25 aa, synthetic construct
  REGION 1..25: note = Description of Artificial Sequence: Synthetic peptide
LCTFLLNKEMYLKLRSDVLLPLTQY

SEQ ID NO: 15230 - protein, 25 aa, synthetic construct
  REGION 1..25: note = Description of Artificial Sequence: Synthetic peptide
CTFLLNKEMYLKLRSDVLLPLTQYN

SEQ ID NO: 15231 - protein, 25 aa, synthetic construct
  REGION 1..25: note = Description of Artificial Sequence: Synthetic peptide
ATNNAMQVESDDYIATNGPLKVGGS

SEQ ID NO: 15232 - protein, 25 aa, synthetic construct
  REGION 1..25: note = Description of Artificial Sequence: Synthetic peptide
YGTEDDYQGKPLEFGATSAALQPEE

SEQ ID NO: 15233 - protein, 25 aa, synthetic construct
  REGION 1..25: note = Description of Artificial Sequence: Synthetic peptide
GTEDDYQGKPLEFGATSAALQPEEE

SEQ ID NO: 15234 - protein, 25 aa, synthetic construct
  REGION 1..25: note = Description of Artificial Sequence: Synthetic peptide
LDGISQYSLRLIDAMMFTSDLATNN

SEQ ID NO: 15235 - protein, 25 aa, synthetic construct
  REGION 1..25: note = Description of Artificial Sequence: Synthetic peptide
DGISQYSLRLIDAMMFTSDLATNNL

SEQ ID NO: 15236 - protein, 25 aa, synthetic construct
  REGION 1..25: note = Description of Artificial Sequence: Synthetic peptide
VVFNGVSFSTFEEAALCTFLLNKEM

SEQ ID NO: 15237 - protein, 25 aa, synthetic construct
  REGION 1..25: note = Description of Artificial Sequence: Synthetic peptide
RVVFNGVSFSTFEEAALCTFLLNKE

SEQ ID NO: 15238 - protein, 25 aa, synthetic construct
  REGION 1..25: note = Description of Artificial Sequence: Synthetic peptide
VFNGVSFSTFEEAALCTFLLNKEMY

SEQ ID NO: 15239 - protein, 25 aa, synthetic construct
  REGION 1..25: note = Description of Artificial Sequence: Synthetic peptide
FNGVSFSTFEEAALCTFLLNKEMYL

SEQ ID NO: 15240 - protein, 25 aa, synthetic construct
  REGION 1..25: note = Description of Artificial Sequence: Synthetic peptide
KRRVVFNGVSFSTFEEAALCTFLLN

SEQ ID NO: 15241 - protein, 25 aa, synthetic construct
  REGION 1..25: note = Description of Artificial Sequence: Synthetic peptide
RRVVFNGVSFSTFEEAALCTFLLNK

SEQ ID NO: 15242 - protein, 25 aa, synthetic construct
  REGION 1..25: note = Description of Artificial Sequence: Synthetic peptide
VENPDILRVYANLGERVRQALLKTV

SEQ ID NO: 15243 - protein, 25 aa, synthetic construct
  REGION 1..25: note = Description of Artificial Sequence: Synthetic peptide
AYTVELGTEVNEFACVVADAVIKTL

SEQ ID NO: 15244 - protein, 25 aa, synthetic construct
  REGION 1..25: note = Description of Artificial Sequence: Synthetic peptide
AVKMFDAYVNTFSSTFNVPMEKLKT

SEQ ID NO: 15245 - protein, 25 aa, synthetic construct
  REGION 1..25: note = Description of Artificial Sequence: Synthetic peptide
TRFQTLLALHRSYLTPGDSSSGWTA

SEQ ID NO: 15246 - protein, 25 aa, synthetic construct
  REGION 1..25: note = Description of Artificial Sequence: Synthetic peptide
VFLLVTLAILTALRLCAYCCNIVNV

SEQ ID NO: 15247 - protein, 25 aa, synthetic construct
  REGION 1..25: note = Description of Artificial Sequence: Synthetic peptide
VVFLLVTLAILTALRLCAYCCNIVN

SEQ ID NO: 15248 - protein, 25 aa, synthetic construct
  REGION 1..25: note = Description of Artificial Sequence: Synthetic peptide
FLLVTLAILTALRLCAYCCNIVNVS

SEQ ID NO: 15249 - protein, 25 aa, synthetic construct
  REGION 1..25: note = Description of Artificial Sequence: Synthetic peptide
LLVTLAILTALRLCAYCCNIVNVSL

SEQ ID NO: 15250 - protein, 25 aa, synthetic construct
  REGION 1..25: note = Description of Artificial Sequence: Synthetic peptide
AFGGCVFSYVGCHNKCAYWVPRASA

SEQ ID NO: 15251 - protein, 25 aa, synthetic construct
  REGION 1..25: note = Description of Artificial Sequence: Synthetic peptide
VVNVVTTKIALKGGKIVNNWLKQLI

SEQ ID NO: 15252 - protein, 25 aa, synthetic construct
  REGION 1..25: note = Description of Artificial Sequence: Synthetic peptide
QVVNVVTTKIALKGGKIVNNWLKQL

SEQ ID NO: 15253 - protein, 25 aa, synthetic construct
  REGION 1..25: note = Description of Artificial Sequence: Synthetic peptide
IGLALYYPSARIVYTACSHAAVDAL

SEQ ID NO: 15254 - protein, 25 aa, synthetic construct
  REGION 1..25: note = Description of Artificial Sequence: Synthetic peptide
YMLTYNKVENMTPRDLGACIDCSAR

SEQ ID NO: 15255 - protein, 25 aa, synthetic construct
  REGION 1..25: note = Description of Artificial Sequence: Synthetic peptide
LKWARFPKSDGTGTIYTELEPPCRF

SEQ ID NO: 15256 - protein, 25 aa, synthetic construct
  REGION 1..25: note = Description of Artificial Sequence: Synthetic peptide
FPKSDGTGTIYTELEPPCRFVTDTP

SEQ ID NO: 15257 - protein, 25 aa, synthetic construct
  REGION 1..25: note = Description of Artificial Sequence: Synthetic peptide
WARFPKSDGTGTIYTELEPPCRFVT

SEQ ID NO: 15258 - protein, 25 aa, synthetic construct
  REGION 1..25: note = Description of Artificial Sequence: Synthetic peptide
DLKWARFPKSDGTGTIYTELEPPCR

SEQ ID NO: 15259 - protein, 25 aa, synthetic construct
  REGION 1..25: note = Description of Artificial Sequence: Synthetic peptide
RFPKSDGTGTIYTELEPPCRFVTDT

SEQ ID NO: 15260 - protein, 25 aa, synthetic construct
  REGION 1..25: note = Description of Artificial Sequence: Synthetic peptide
KWARFPKSDGTGTIYTELEPPCRFV

SEQ ID NO: 15261 - protein, 25 aa, synthetic construct
  REGION 1..25: note = Description of Artificial Sequence: Synthetic peptide
QDLKWARFPKSDGTGTIYTELEPPC

SEQ ID NO: 15262 - protein, 25 aa, synthetic construct
  REGION 1..25: note = Description of Artificial Sequence: Synthetic peptide
ARFPKSDGTGTIYTELEPPCRFVTD

SEQ ID NO: 15263 - protein, 25 aa, synthetic construct
  REGION 1..25: note = Description of Artificial Sequence: Synthetic peptide
WYDFVENPDILRVYANLGERVRQAL

SEQ ID NO: 15264 - protein, 25 aa, synthetic construct
  REGION 1..25: note = Description of Artificial Sequence: Synthetic peptide
DWYDFVENPDILRVYANLGERVRQA

SEQ ID NO: 15265 - protein, 25 aa, synthetic construct
  REGION 1..25: note = Description of Artificial Sequence: Synthetic peptide
ISVTSNYSGVVTTVMFLARGIVFMC

SEQ ID NO: 15266 - protein, 25 aa, synthetic construct
  REGION 1..25: note = Description of Artificial Sequence: Synthetic peptide
IISVTSNYSGVVTTVMFLARGIVFM

SEQ ID NO: 15267 - protein, 25 aa, synthetic construct
  REGION 1..25: note = Description of Artificial Sequence: Synthetic peptide
LIISVTSNYSGVVTTVMFLARGIVF

SEQ ID NO: 15268 - protein, 25 aa, synthetic construct
  REGION 1..25: note = Description of Artificial Sequence: Synthetic peptide
SAYTVELGTEVNEFACVVADAVIKT

SEQ ID NO: 15269 - protein, 25 aa, synthetic construct
  REGION 1..25: note = Description of Artificial Sequence: Synthetic peptide
CSAYTVELGTEVNEFACVVADAVIK

SEQ ID NO: 15270 - protein, 25 aa, synthetic construct
  REGION 1..25: note = Description of Artificial Sequence: Synthetic peptide
AFASEAARVVRSIFSRTLETAQNSV

SEQ ID NO: 15271 - protein, 25 aa, synthetic construct
  REGION 1..25: note = Description of Artificial Sequence: Synthetic peptide
SNYQHEETIYNLLKDCPAVAKHDFF

SEQ ID NO: 15272 - protein, 25 aa, synthetic construct
  REGION 1..25: note = Description of Artificial Sequence: Synthetic peptide
YQHEETIYNLLKDCPAVAKHDFFKF

SEQ ID NO: 15273 - protein, 25 aa, synthetic construct
  REGION 1..25: note = Description of Artificial Sequence: Synthetic peptide
NYQHEETIYNLLKDCPAVAKHDFFK

SEQ ID NO: 15274 - protein, 25 aa, synthetic construct
  REGION 1..25: note = Description of Artificial Sequence: Synthetic peptide
KIKACVEEVTTTLEETKFLTENLLL

SEQ ID NO: 15275 - protein, 25 aa, synthetic construct
  REGION 1..25: note = Description of Artificial Sequence: Synthetic peptide
KDWYDFVENPDILRVYANLGERVRQ

SEQ ID NO: 15276 - protein, 25 aa, synthetic construct
  REGION 1..25: note = Description of Artificial Sequence: Synthetic peptide
ITLKKRWQLALSKGVHFVCNLLLLF

SEQ ID NO: 15277 - protein, 25 aa, synthetic construct
  REGION 1..25: note = Description of Artificial Sequence: Synthetic peptide
IITLKKRWQLALSKGVHFVCNLLLL

SEQ ID NO: 15278 - protein, 25 aa, synthetic construct
  REGION 1..25: note = Description of Artificial Sequence: Synthetic peptide
FVTQRNFYEPQIITTDNTFVSGNCD

SEQ ID NO: 15279 - protein, 25 aa, synthetic construct
  REGION 1..25: note = Description of Artificial Sequence: Synthetic peptide
GGKGFCKLHNWNCVNCDTFCAGSTF

SEQ ID NO: 15280 - protein, 25 aa, synthetic construct
  REGION 1..25: note = Description of Artificial Sequence: Synthetic peptide
NGGKGFCKLHNWNCVNCDTFCAGST

SEQ ID NO: 15281 - protein, 25 aa, synthetic construct
  REGION 1..25: note = Description of Artificial Sequence: Synthetic peptide
GLDSLDTYPSLETIQITISSFKWDL

SEQ ID NO: 15282 - protein, 25 aa, synthetic construct
  REGION 1..25: note = Description of Artificial Sequence: Synthetic peptide
KAIVSTIQRKYKGIKIQEGVVDYGA

SEQ ID NO: 15283 - protein, 25 aa, synthetic construct
  REGION 1..25: note = Description of Artificial Sequence: Synthetic peptide
AIVSTIQRKYKGIKIQEGVVDYGAR

SEQ ID NO: 15284 - protein, 25 aa, synthetic construct
  REGION 1..25: note = Description of Artificial Sequence: Synthetic peptide
VSTIQRKYKGIKIQEGVVDYGARFY

SEQ ID NO: 15285 - protein, 25 aa, synthetic construct
  REGION 1..25: note = Description of Artificial Sequence: Synthetic peptide
IVSTIQRKYKGIKIQEGVVDYGARF

SEQ ID NO: 15286 - protein, 25 aa, synthetic construct
  REGION 1..25: note = Description of Artificial Sequence: Synthetic peptide
TKAIVSTIQRKYKGIKIQEGVVDYG

SEQ ID NO: 15287 - protein, 25 aa, synthetic construct
  REGION 1..25: note = Description of Artificial Sequence: Synthetic peptide
LPKGIMMNVAKYTQLCQYLNTLTLA

SEQ ID NO: 15288 - protein, 25 aa, synthetic construct
  REGION 1..25: note = Description of Artificial Sequence: Synthetic peptide
DLQDLKWARFPKSDGTGTIYTELEP

SEQ ID NO: 15289 - protein, 25 aa, synthetic construct
  REGION 1..25: note = Description of Artificial Sequence: Synthetic peptide
NSIIKTIQPRVEKKKLDGFMGRIRS

SEQ ID NO: 15290 - protein, 25 aa, synthetic construct
  REGION 1..25: note = Description of Artificial Sequence: Synthetic peptide
NSTYASQGLVASIKNFKSVLYYQNN

SEQ ID NO: 15291 - protein, 25 aa, synthetic construct
  REGION 1..25: note = Description of Artificial Sequence: Synthetic peptide
TDFVNEFYAYLRKHFSMMILSDDAV

SEQ ID NO: 15292 - protein, 25 aa, synthetic construct
  REGION 1..25: note = Description of Artificial Sequence: Synthetic peptide
DTDFVNEFYAYLRKHFSMMILSDDA

SEQ ID NO: 15293 - protein, 25 aa, synthetic construct
  REGION 1..25: note = Description of Artificial Sequence: Synthetic peptide
IKVTLVFLFVAAIFYLITPVHVMSK

SEQ ID NO: 15294 - protein, 25 aa, synthetic construct
  REGION 1..25: note = Description of Artificial Sequence: Synthetic peptide
LKDCVMYASAVVLLILMTARTVYDD

SEQ ID NO: 15295 - protein, 25 aa, synthetic construct
  REGION 1..25: note = Description of Artificial Sequence: Synthetic peptide
TPKYKFVRIQPGQTFSVLACYNGSP

SEQ ID NO: 15296 - protein, 25 aa, synthetic construct
  REGION 1..25: note = Description of Artificial Sequence: Synthetic peptide
YTDFATSACVLAAECTIFKDASGKP

SEQ ID NO: 15297 - protein, 25 aa, synthetic construct
  REGION 1..25: note = Description of Artificial Sequence: Synthetic peptide
EYTDFATSACVLAAECTIFKDASGK

SEQ ID NO: 15298 - protein, 25 aa, synthetic construct
  REGION 1..25: note = Description of Artificial Sequence: Synthetic peptide
SKLWAQCVQLHNDILLAKDTTEAFE

SEQ ID NO: 15299 - protein, 25 aa, synthetic construct
  REGION 1..25: note = Description of Artificial Sequence: Synthetic peptide
GVHFVCNLLLLFVTVYSHLLLVAAG

SEQ ID NO: 15300 - protein, 25 aa, synthetic construct
  REGION 1..25: note = Description of Artificial Sequence: Synthetic peptide
KLKVDTANPKTPKYKFVRIQPGQTF

SEQ ID NO: 15301 - protein, 25 aa, synthetic construct
  REGION 1..25: note = Description of Artificial Sequence: Synthetic peptide
KGLNNLNRGMVLGSLAATVRLQAGN

SEQ ID NO: 15302 - protein, 25 aa, synthetic construct
  REGION 1..25: note = Description of Artificial Sequence: Synthetic peptide
PNASFDNFKFVCDNIKFADDLNQLT

SEQ ID NO: 15303 - protein, 25 aa, synthetic construct
  REGION 1..25: note = Description of Artificial Sequence: Synthetic peptide
VVFLHVTYVPAQEKNFTTAPAICHD

SEQ ID NO: 15304 - protein, 25 aa, synthetic construct
  REGION 1..25: note = Description of Artificial Sequence: Synthetic peptide
GVVFLHVTYVPAQEKNFTTAPAICH

SEQ ID NO: 15305 - protein, 25 aa, synthetic construct
  REGION 1..25: note = Description of Artificial Sequence: Synthetic peptide
VFLHVTYVPAQEKNFTTAPAICHDG

SEQ ID NO: 15306 - protein, 25 aa, synthetic construct
  REGION 1..25: note = Description of Artificial Sequence: Synthetic peptide
HGVVFLHVTYVPAQEKNFTTAPAIC

SEQ ID NO: 15307 - protein, 25 aa, synthetic construct
  REGION 1..25: note = Description of Artificial Sequence: Synthetic peptide
DGADVTKIKPHNSHEGKTFYVLPND

SEQ ID NO: 15308 - protein, 25 aa, synthetic construct
  REGION 1..25: note = Description of Artificial Sequence: Synthetic peptide
PTYLDGADVTKIKPHNSHEGKTFYV

SEQ ID NO: 15309 - protein, 25 aa, synthetic construct
  REGION 1..25: note = Description of Artificial Sequence: Synthetic peptide
LDGADVTKIKPHNSHEGKTFYVLPN

SEQ ID NO: 15310 - protein, 25 aa, synthetic construct
  REGION 1..25: note = Description of Artificial Sequence: Synthetic peptide
YLDGADVTKIKPHNSHEGKTFYVLP

SEQ ID NO: 15311 - protein, 25 aa, synthetic construct
  REGION 1..25: note = Description of Artificial Sequence: Synthetic peptide
TYLDGADVTKIKPHNSHEGKTFYVL

SEQ ID NO: 15312 - protein, 25 aa, synthetic construct
  REGION 1..25: note = Description of Artificial Sequence: Synthetic peptide
CHIDHPNPKGFCDLKGKYVQIPTTC

SEQ ID NO: 15313 - protein, 25 aa, synthetic construct
  REGION 1..25: note = Description of Artificial Sequence: Synthetic peptide
CRCHIDHPNPKGFCDLKGKYVQIPT

SEQ ID NO: 15314 - protein, 25 aa, synthetic construct
  REGION 1..25: note = Description of Artificial Sequence: Synthetic peptide
RCHIDHPNPKGFCDLKGKYVQIPTT

SEQ ID NO: 15315 - protein, 25 aa, synthetic construct
  REGION 1..25: note = Description of Artificial Sequence: Synthetic peptide
YLALYNKYKYFSGAMDTTSYREAAC

SEQ ID NO: 15316 - protein, 25 aa, synthetic construct
  REGION 1..25: note = Description of Artificial Sequence: Synthetic peptide
SEVGPEHSLAEYHNESGLKTILRKG

SEQ ID NO: 15317 - protein, 25 aa, synthetic construct
  REGION 1..25: note = Description of Artificial Sequence: Synthetic peptide
HNSEVGPEHSLAEYHNESGLKTILR

SEQ ID NO: 15318 - protein, 25 aa, synthetic construct
  REGION 1..25: note = Description of Artificial Sequence: Synthetic peptide
NSEVGPEHSLAEYHNESGLKTILRK

SEQ ID NO: 15319 - protein, 25 aa, synthetic construct
  REGION 1..25: note = Description of Artificial Sequence: Synthetic peptide
NASVVNIQKEIDRLNEVAKNLNESL

SEQ ID NO: 15320 - protein, 25 aa, synthetic construct
  REGION 1..25: note = Description of Artificial Sequence: Synthetic peptide
ASVVNIQKEIDRLNEVAKNLNESLI

SEQ ID NO: 15321 - protein, 25 aa, synthetic construct
  REGION 1..25: note = Description of Artificial Sequence: Synthetic peptide
PRVEKKKLDGFMGRIRSVYPVASPN

SEQ ID NO: 15322 - protein, 25 aa, synthetic construct
  REGION 1..25: note = Description of Artificial Sequence: Synthetic peptide
RVEKKKLDGFMGRIRSVYPVASPNE

SEQ ID NO: 15323 - protein, 25 aa, synthetic construct
  REGION 1..25: note = Description of Artificial Sequence: Synthetic peptide
PFEIKLAKKFDTFNGECPNFVFPLN

SEQ ID NO: 15324 - protein, 25 aa, synthetic construct
  REGION 1..25: note = Description of Artificial Sequence: Synthetic peptide
KLAKKFDTFNGECPNFVFPLNSIIK

SEQ ID NO: 15325 - protein, 25 aa, synthetic construct
  REGION 1..25: note = Description of Artificial Sequence: Synthetic peptide
LAKKFDTFNGECPNFVFPLNSIIKT

SEQ ID NO: 15326 - protein, 25 aa, synthetic construct
  REGION 1..25: note = Description of Artificial Sequence: Synthetic peptide
EIKLAKKFDTFNGECPNFVFPLNSI

SEQ ID NO: 15327 - protein, 25 aa, synthetic construct
  REGION 1..25: note = Description of Artificial Sequence: Synthetic peptide
FEIKLAKKFDTFNGECPNFVFPLNS

SEQ ID NO: 15328 - protein, 25 aa, synthetic construct
  REGION 1..25: note = Description of Artificial Sequence: Synthetic peptide
IKLAKKFDTFNGECPNFVFPLNSII

SEQ ID NO: 15329 - protein, 25 aa, synthetic construct
  REGION 1..25: note = Description of Artificial Sequence: Synthetic peptide
AMQRKLEKMADQAMTQMYKQARSED

SEQ ID NO: 15330 - protein, 25 aa, synthetic construct
  REGION 1..25: note = Description of Artificial Sequence: Synthetic peptide
FKEGVEFLRDGWEIVKFISTCACEI

SEQ ID NO: 15331 - protein, 25 aa, synthetic construct
  REGION 1..25: note = Description of Artificial Sequence: Synthetic peptide
TDFATSACVLAAECTIFKDASGKPV

SEQ ID NO: 15332 - protein, 25 aa, synthetic construct
  REGION 1..25: note = Description of Artificial Sequence: Synthetic peptide
TTRQVVNVVTTKIALKGGKIVNNWL

SEQ ID NO: 15333 - protein, 25 aa, synthetic construct
  REGION 1..25: note = Description of Artificial Sequence: Synthetic peptide
MSFPQSAPHGVVFLHVTYVPAQEKN

SEQ ID NO: 15334 - protein, 25 aa, synthetic construct
  REGION 1..25: note = Description of Artificial Sequence: Synthetic peptide
DVGDSAEVAVKMFDAYVNTFSSTFN

SEQ ID NO: 15335 - protein, 25 aa, synthetic construct
  REGION 1..25: note = Description of Artificial Sequence: Synthetic peptide
KDEDDNLIDSYFVVKRHTFSNYQHE

SEQ ID NO: 15336 - protein, 25 aa, synthetic construct
  REGION 1..25: note = Description of Artificial Sequence: Synthetic peptide
EKDEDDNLIDSYFVVKRHTFSNYQH

SEQ ID NO: 15337 - protein, 25 aa, synthetic construct
  REGION 1..25: note = Description of Artificial Sequence: Synthetic peptide
QEKDEDDNLIDSYFVVKRHTFSNYQ

SEQ ID NO: 15338 - protein, 25 aa, synthetic construct
  REGION 1..25: note = Description of Artificial Sequence: Synthetic peptide
LWEIQQVVDADSKIVQLSEISMDNS

SEQ ID NO: 15339 - protein, 25 aa, synthetic construct
  REGION 1..25: note = Description of Artificial Sequence: Synthetic peptide
SMQGAVDINKLCEEMLDNRATLQAI

SEQ ID NO: 15340 - protein, 25 aa, synthetic construct
  REGION 1..25: note = Description of Artificial Sequence: Synthetic peptide
LSMQGAVDINKLCEEMLDNRATLQA

SEQ ID NO: 15341 - protein, 25 aa, synthetic construct
  REGION 1..25: note = Description of Artificial Sequence: Synthetic peptide
DDTLRVEAFEYYHTTDPSFLGRYMS

SEQ ID NO: 15342 - protein, 25 aa, synthetic construct
  REGION 1..25: note = Description of Artificial Sequence: Synthetic peptide
LRVEAFEYYHTTDPSFLGRYMSALN

SEQ ID NO: 15343 - protein, 25 aa, synthetic construct
  REGION 1..25: note = Description of Artificial Sequence: Synthetic peptide
DTLRVEAFEYYHTTDPSFLGRYMSA

SEQ ID NO: 15344 - protein, 25 aa, synthetic construct
  REGION 1..25: note = Description of Artificial Sequence: Synthetic peptide
NDDTLRVEAFEYYHTTDPSFLGRYM

SEQ ID NO: 15345 - protein, 25 aa, synthetic construct
  REGION 1..25: note = Description of Artificial Sequence: Synthetic peptide
TLRVEAFEYYHTTDPSFLGRYMSAL

SEQ ID NO: 15346 - protein, 25 aa, synthetic construct
  REGION 1..25: note = Description of Artificial Sequence: Synthetic peptide
RVEAFEYYHTTDPSFLGRYMSALNH

SEQ ID NO: 15347 - protein, 25 aa, synthetic construct
  REGION 1..25: note = Description of Artificial Sequence: Synthetic peptide
ADVFHLYLQYIRKLHDELTGHMLDM

SEQ ID NO: 15348 - protein, 25 aa, synthetic construct
  REGION 1..25: note = Description of Artificial Sequence: Synthetic peptide
YFSGAMDTTSYREAACCHLAKALND

SEQ ID NO: 15349 - protein, 25 aa, synthetic construct
  REGION 1..25: note = Description of Artificial Sequence: Synthetic peptide
FSGAMDTTSYREAACCHLAKALNDF

SEQ ID NO: 15350 - protein, 25 aa, synthetic construct
  REGION 1..25: note = Description of Artificial Sequence: Synthetic peptide
GAMDTTSYREAACCHLAKALNDFSN

SEQ ID NO: 15351 - protein, 25 aa, synthetic construct
  REGION 1..25: note = Description of Artificial Sequence: Synthetic peptide
SGAMDTTSYREAACCHLAKALNDFS

SEQ ID NO: 15352 - protein, 25 aa, synthetic construct
  REGION 1..25: note = Description of Artificial Sequence: Synthetic peptide
EKFKEGVEFLRDGWEIVKFISTCAC

SEQ ID NO: 15353 - protein, 25 aa, synthetic construct
  REGION 1..25: note = Description of Artificial Sequence: Synthetic peptide
LDGFMGRIRSVYPVASPNECNQMCL

SEQ ID NO: 15354 - protein, 25 aa, synthetic construct
  REGION 1..25: note = Description of Artificial Sequence: Synthetic peptide
GFMGRIRSVYPVASPNECNQMCLST

SEQ ID NO: 15355 - protein, 25 aa, synthetic construct
  REGION 1..25: note = Description of Artificial Sequence: Synthetic peptide
DGFMGRIRSVYPVASPNECNQMCLS

SEQ ID NO: 15356 - protein, 25 aa, synthetic construct
  REGION 1..25: note = Description of Artificial Sequence: Synthetic peptide
FMGRIRSVYPVASPNECNQMCLSTL

SEQ ID NO: 15357 - protein, 25 aa, synthetic construct
  REGION 1..25: note = Description of Artificial Sequence: Synthetic peptide
KLDGFMGRIRSVYPVASPNECNQMC

SEQ ID NO: 15358 - protein, 25 aa, synthetic construct
  REGION 1..25: note = Description of Artificial Sequence: Synthetic peptide
VEVQPQLEMELTPVVQTIEVNSFSG

SEQ ID NO: 15359 - protein, 25 aa, synthetic construct
  REGION 1..25: note = Description of Artificial Sequence: Synthetic peptide
EVQPQLEMELTPVVQTIEVNSFSGY

SEQ ID NO: 15360 - protein, 25 aa, synthetic construct
  REGION 1..25: note = Description of Artificial Sequence: Synthetic peptide
VQPQLEMELTPVVQTIEVNSFSGYL

SEQ ID NO: 15361 - protein, 25 aa, synthetic construct
  REGION 1..25: note = Description of Artificial Sequence: Synthetic peptide
KTLVATAEAELAKNVSLDNVLSTFI

SEQ ID NO: 15362 - protein, 25 aa, synthetic construct
  REGION 1..25: note = Description of Artificial Sequence: Synthetic peptide
TACTDDNALAYYNTTKGGRFVLALL

SEQ ID NO: 15363 - protein, 25 aa, synthetic construct
  REGION 1..25: note = Description of Artificial Sequence: Synthetic peptide
ACTDDNALAYYNTTKGGRFVLALLS

SEQ ID NO: 15364 - protein, 25 aa, synthetic construct
  REGION 1..25: note = Description of Artificial Sequence: Synthetic peptide
TQTACTDDNALAYYNTTKGGRFVLA

SEQ ID NO: 15365 - protein, 25 aa, synthetic construct
  REGION 1..25: note = Description of Artificial Sequence: Synthetic peptide
QTACTDDNALAYYNTTKGGRFVLAL

SEQ ID NO: 15366 - protein, 25 aa, synthetic construct
  REGION 1..25: note = Description of Artificial Sequence: Synthetic peptide
TTQTACTDDNALAYYNTTKGGRFVL

SEQ ID NO: 15367 - protein, 25 aa, synthetic construct
  REGION 1..25: note = Description of Artificial Sequence: Synthetic peptide
CTDDNALAYYNTTKGGRFVLALLSD

SEQ ID NO: 15368 - protein, 25 aa, synthetic construct
  REGION 1..25: note = Description of Artificial Sequence: Synthetic peptide
GTTQTACTDDNALAYYNTTKGGRFV

SEQ ID NO: 15369 - protein, 25 aa, synthetic construct
  REGION 1..25: note = Description of Artificial Sequence: Synthetic peptide
IAWYTERSEKSYELQTPFEIKLAKK

SEQ ID NO: 15370 - protein, 25 aa, synthetic construct
  REGION 1..25: note = Description of Artificial Sequence: Synthetic peptide
EIAWYTERSEKSYELQTPFEIKLAK

SEQ ID NO: 15371 - protein, 25 aa, synthetic construct
  REGION 1..25: note = Description of Artificial Sequence: Synthetic peptide
SNLGMPSYCTGYREGYLNSTNVTIA

SEQ ID NO: 15372 - protein, 25 aa, synthetic construct
  REGION 1..25: note = Description of Artificial Sequence: Synthetic peptide
LMSNLGMPSYCTGYREGYLNSTNVT

SEQ ID NO: 15373 - protein, 25 aa, synthetic construct
  REGION 1..25: note = Description of Artificial Sequence: Synthetic peptide
NLGMPSYCTGYREGYLNSTNVTIAT

SEQ ID NO: 15374 - protein, 25 aa, synthetic construct
  REGION 1..25: note = Description of Artificial Sequence: Synthetic peptide
VLMSNLGMPSYCTGYREGYLNSTNV

SEQ ID NO: 15375 - protein, 25 aa, synthetic construct
  REGION 1..25: note = Description of Artificial Sequence: Synthetic peptide
MSNLGMPSYCTGYREGYLNSTNVTI

SEQ ID NO: 15376 - protein, 25 aa, synthetic construct
  REGION 1..25: note = Description of Artificial Sequence: Synthetic peptide
LGMPSYCTGYREGYLNSTNVTIATY

SEQ ID NO: 15377 - protein, 25 aa, synthetic construct
  REGION 1..25: note = Description of Artificial Sequence: Synthetic peptide
ALVYFLQSINFVRIIMRLWLCWKCR

SEQ ID NO: 15378 - protein, 25 aa, synthetic construct
  REGION 1..25: note = Description of Artificial Sequence: Synthetic peptide
DDNALAYYNTTKGGRFVLALLSDLQ

SEQ ID NO: 15379 - protein, 25 aa, synthetic construct
  REGION 1..25: note = Description of Artificial Sequence: Synthetic peptide
FDVLKSEDAQGMDNLACEDLKPVSE

SEQ ID NO: 15380 - protein, 25 aa, synthetic construct
  REGION 1..25: note = Description of Artificial Sequence: Synthetic peptide
SKPSVEQRKQDDKKIKACVEEVTTT

SEQ ID NO: 15381 - protein, 25 aa, synthetic construct
  REGION 1..25: note = Description of Artificial Sequence: Synthetic peptide
KPSVEQRKQDDKKIKACVEEVTTTL

SEQ ID NO: 15382 - protein, 25 aa, synthetic construct
  REGION 1..25: note = Description of Artificial Sequence: Synthetic peptide
QEYADVFHLYLQYIRKLHDELTGHM

SEQ ID NO: 15383 - protein, 25 aa, synthetic construct
  REGION 1..25: note = Description of Artificial Sequence: Synthetic peptide
EYADVFHLYLQYIRKLHDELTGHML

SEQ ID NO: 15384 - protein, 25 aa, synthetic construct
  REGION 1..25: note = Description of Artificial Sequence: Synthetic peptide
NQEYADVFHLYLQYIRKLHDELTGH

SEQ ID NO: 15385 - protein, 25 aa, synthetic construct
  REGION 1..25: note = Description of Artificial Sequence: Synthetic peptide
TRCLNRVCTNYMPYFFTLLLQLCTF

SEQ ID NO: 15386 - protein, 25 aa, synthetic construct
  REGION 1..25: note = Description of Artificial Sequence: Synthetic peptide
MNVLTLVYKVYYGNALDQAISMWAL

SEQ ID NO: 15387 - protein, 25 aa, synthetic construct
  REGION 1..25: note = Description of Artificial Sequence: Synthetic peptide
RVWTLMNVLTLVYKVYYGNALDQAI

SEQ ID NO: 15388 - protein, 25 aa, synthetic construct
  REGION 1..25: note = Description of Artificial Sequence: Synthetic peptide
LMNVLTLVYKVYYGNALDQAISMWA

SEQ ID NO: 15389 - protein, 25 aa, synthetic construct
  REGION 1..25: note = Description of Artificial Sequence: Synthetic peptide
RRVWTLMNVLTLVYKVYYGNALDQA

SEQ ID NO: 15390 - protein, 25 aa, synthetic construct
  REGION 1..25: note = Description of Artificial Sequence: Synthetic peptide
WTLMNVLTLVYKVYYGNALDQAISM

SEQ ID NO: 15391 - protein, 25 aa, synthetic construct
  REGION 1..25: note = Description of Artificial Sequence: Synthetic peptide
TLMNVLTLVYKVYYGNALDQAISMW

SEQ ID NO: 15392 - protein, 25 aa, synthetic construct
  REGION 1..25: note = Description of Artificial Sequence: Synthetic peptide
NVLTLVYKVYYGNALDQAISMWALI

SEQ ID NO: 15393 - protein, 25 aa, synthetic construct
  REGION 1..25: note = Description of Artificial Sequence: Synthetic peptide
VWTLMNVLTLVYKVYYGNALDQAIS

SEQ ID NO: 15394 - protein, 25 aa, synthetic construct
  REGION 1..25: note = Description of Artificial Sequence: Synthetic peptide
TARTVYDDGARRVWTLMNVLTLVYK

SEQ ID NO: 15395 - protein, 25 aa, synthetic construct
  REGION 1..25: note = Description of Artificial Sequence: Synthetic peptide
AANFCALILAYCNKTVGELGDVRET

SEQ ID NO: 15396 - protein, 25 aa, synthetic construct
  REGION 1..25: note = Description of Artificial Sequence: Synthetic peptide
EAANFCALILAYCNKTVGELGDVRE

SEQ ID NO: 15397 - protein, 25 aa, synthetic construct
  REGION 1..25: note = Description of Artificial Sequence: Synthetic peptide
ANFCALILAYCNKTVGELGDVRETM

SEQ ID NO: 15398 - protein, 25 aa, synthetic construct
  REGION 1..25: note = Description of Artificial Sequence: Synthetic peptide
DEFTPFDVVRQCSGVTFQSAVKRTI

SEQ ID NO: 15399 - protein, 25 aa, synthetic construct
  REGION 1..25: note = Description of Artificial Sequence: Synthetic peptide
TSEDMLNPNYEDLLIRKSNHNFLVQ

SEQ ID NO: 15400 - protein, 25 aa, synthetic construct
  REGION 1..25: note = Description of Artificial Sequence: Synthetic peptide
SVRVVTTFDSEYCRHGTCERSEAGV

SEQ ID NO: 15401 - protein, 25 aa, synthetic construct
  REGION 1..25: note = Description of Artificial Sequence: Synthetic peptide
GLFCLLNRYFRLTLGVYDYLVSTQE

SEQ ID NO: 15402 - protein, 25 aa, synthetic construct
  REGION 1..25: note = Description of Artificial Sequence: Synthetic peptide
LIDSYFVVKRHTFSNYQHEETIYNL

SEQ ID NO: 15403 - protein, 25 aa, synthetic construct
  REGION 1..25: note = Description of Artificial Sequence: Synthetic peptide
NLIDSYFVVKRHTFSNYQHEETIYN

SEQ ID NO: 15404 - protein, 25 aa, synthetic construct
  REGION 1..25: note = Description of Artificial Sequence: Synthetic peptide
DNLIDSYFVVKRHTFSNYQHEETIY

SEQ ID NO: 15405 - protein, 25 aa, synthetic construct
  REGION 1..25: note = Description of Artificial Sequence: Synthetic peptide
EDDNLIDSYFVVKRHTFSNYQHEET

SEQ ID NO: 15406 - protein, 25 aa, synthetic construct
  REGION 1..25: note = Description of Artificial Sequence: Synthetic peptide
DDNLIDSYFVVKRHTFSNYQHEETI

SEQ ID NO: 15407 - protein, 25 aa, synthetic construct
  REGION 1..25: note = Description of Artificial Sequence: Synthetic peptide
QQVVDADSKIVQLSEISMDNSPNLA

SEQ ID NO: 15408 - protein, 25 aa, synthetic construct
  REGION 1..25: note = Description of Artificial Sequence: Synthetic peptide
VVDADSKIVQLSEISMDNSPNLAWP

SEQ ID NO: 15409 - protein, 25 aa, synthetic construct
  REGION 1..25: note = Description of Artificial Sequence: Synthetic peptide
QVVDADSKIVQLSEISMDNSPNLAW

SEQ ID NO: 15410 - protein, 25 aa, synthetic construct
  REGION 1..25: note = Description of Artificial Sequence: Synthetic peptide
SDIDITFLKKDAPYIVGDVVQEGVL

SEQ ID NO: 15411 - protein, 25 aa, synthetic construct
  REGION 1..25: note = Description of Artificial Sequence: Synthetic peptide
VHVMSKHTDFSSEIIGYKAIDGGVT

SEQ ID NO: 15412 - protein, 25 aa, synthetic construct
  REGION 1..25: note = Description of Artificial Sequence: Synthetic peptide
DSMSYEDQDALFAYTKRNVIPTITQ

SEQ ID NO: 15413 - protein, 25 aa, synthetic construct
  REGION 1..25: note = Description of Artificial Sequence: Synthetic peptide
SYEDQDALFAYTKRNVIPTITQMNL

SEQ ID NO: 15414 - protein, 25 aa, synthetic construct
  REGION 1..25: note = Description of Artificial Sequence: Synthetic peptide
MSYEDQDALFAYTKRNVIPTITQMN

SEQ ID NO: 15415 - protein, 25 aa, synthetic construct
  REGION 1..25: note = Description of Artificial Sequence: Synthetic peptide
SMSYEDQDALFAYTKRNVIPTITQM

SEQ ID NO: 15416 - protein, 25 aa, synthetic construct
  REGION 1..25: note = Description of Artificial Sequence: Synthetic peptide
SSEIIGYKAIDGGVTRDIASTDTCF

SEQ ID NO: 15417 - protein, 25 aa, synthetic construct
  REGION 1..25: note = Description of Artificial Sequence: Synthetic peptide
ISNEKQEILGTVSWNLREMLAHAEE

SEQ ID NO: 15418 - protein, 25 aa, synthetic construct
  REGION 1..25: note = Description of Artificial Sequence: Synthetic peptide
SIISNEKQEILGTVSWNLREMLAHA

SEQ ID NO: 15419 - protein, 25 aa, synthetic construct
  REGION 1..25: note = Description of Artificial Sequence: Synthetic peptide
IISNEKQEILGTVSWNLREMLAHAE

SEQ ID NO: 15420 - protein, 25 aa, synthetic construct
  REGION 1..25: note = Description of Artificial Sequence: Synthetic peptide
AEVAVKMFDAYVNTFSSTFNVPMEK

SEQ ID NO: 15421 - protein, 25 aa, synthetic construct
  REGION 1..25: note = Description of Artificial Sequence: Synthetic peptide
LAYYNTTKGGRFVLALLSDLQDLKW

SEQ ID NO: 15422 - protein, 25 aa, synthetic construct
  REGION 1..25: note = Description of Artificial Sequence: Synthetic peptide
ALAYYNTTKGGRFVLALLSDLQDLK

SEQ ID NO: 15423 - protein, 25 aa, synthetic construct
  REGION 1..25: note = Description of Artificial Sequence: Synthetic peptide
VYSVIYLYLTFYLTNDVSFLAHIQW

SEQ ID NO: 15424 - protein, 25 aa, synthetic construct
  REGION 1..25: note = Description of Artificial Sequence: Synthetic peptide
ANNTKGSLPINVIVFDGKSKCEESS

SEQ ID NO: 15425 - protein, 25 aa, synthetic construct
  REGION 1..25: note = Description of Artificial Sequence: Synthetic peptide
NNTKGSLPINVIVFDGKSKCEESSA

SEQ ID NO: 15426 - protein, 25 aa, synthetic construct
  REGION 1..25: note = Description of Artificial Sequence: Synthetic peptide
VTCGTTTLNGLWLDDVVYCPRHVIC

SEQ ID NO: 15427 - protein, 25 aa, synthetic construct
  REGION 1..25: note = Description of Artificial Sequence: Synthetic peptide
EGNFYGPFVDRQTAQAAGTDTTITV

SEQ ID NO: 15428 - protein, 25 aa, synthetic construct
  REGION 1..25: note = Description of Artificial Sequence: Synthetic peptide
YGPFVDRQTAQAAGTDTTITVNVLA

SEQ ID NO: 15429 - protein, 25 aa, synthetic construct
  REGION 1..25: note = Description of Artificial Sequence: Synthetic peptide
NFYGPFVDRQTAQAAGTDTTITVNV

SEQ ID NO: 15430 - protein, 25 aa, synthetic construct
  REGION 1..25: note = Description of Artificial Sequence: Synthetic peptide
GNFYGPFVDRQTAQAAGTDTTITVN

SEQ ID NO: 15431 - protein, 25 aa, synthetic construct
  REGION 1..25: note = Description of Artificial Sequence: Synthetic peptide
FYGPFVDRQTAQAAGTDTTITVNVL

SEQ ID NO: 15432 - protein, 25 aa, synthetic construct
  REGION 1..25: note = Description of Artificial Sequence: Synthetic peptide
LEGNFYGPFVDRQTAQAAGTDTTIT

SEQ ID NO: 15433 - protein, 25 aa, synthetic construct
  REGION 1..25: note = Description of Artificial Sequence: Synthetic peptide
LNLEEAARYMRSLKVPATVSVSSPD

SEQ ID NO: 15434 - protein, 25 aa, synthetic construct
  REGION 1..25: note = Description of Artificial Sequence: Synthetic peptide
HGLNLEEAARYMRSLKVPATVSVSS

SEQ ID NO: 15435 - protein, 25 aa, synthetic construct
  REGION 1..25: note = Description of Artificial Sequence: Synthetic peptide
NLEEAARYMRSLKVPATVSVSSPDA

SEQ ID NO: 15436 - protein, 25 aa, synthetic construct
  REGION 1..25: note = Description of Artificial Sequence: Synthetic peptide
GLNLEEAARYMRSLKVPATVSVSSP

SEQ ID NO: 15437 - protein, 25 aa, synthetic construct
  REGION 1..25: note = Description of Artificial Sequence: Synthetic peptide
LEEAARYMRSLKVPATVSVSSPDAV

SEQ ID NO: 15438 - protein, 25 aa, synthetic construct
  REGION 1..25: note = Description of Artificial Sequence: Synthetic peptide
THGLNLEEAARYMRSLKVPATVSVS

SEQ ID NO: 15439 - protein, 25 aa, synthetic construct
  REGION 1..25: note = Description of Artificial Sequence: Synthetic peptide
KDNSYFTEQPIDLVPNQPYPNASFD

SEQ ID NO: 15440 - protein, 25 aa, synthetic construct
  REGION 1..25: note = Description of Artificial Sequence: Synthetic peptide
DNSYFTEQPIDLVPNQPYPNASFDN

SEQ ID NO: 15441 - protein, 25 aa, synthetic construct
  REGION 1..25: note = Description of Artificial Sequence: Synthetic peptide
SLPINVIVFDGKSKCEESSAKSASV

SEQ ID NO: 15442 - protein, 25 aa, synthetic construct
  REGION 1..25: note = Description of Artificial Sequence: Synthetic peptide
LPINVIVFDGKSKCEESSAKSASVY

SEQ ID NO: 15443 - protein, 25 aa, synthetic construct
  REGION 1..25: note = Description of Artificial Sequence: Synthetic peptide
LKGGKIVNNWLKQLIKVTLVFLFVA

SEQ ID NO: 15444 - protein, 25 aa, synthetic construct
  REGION 1..25: note = Description of Artificial Sequence: Synthetic peptide
TTIVNGVRRSFYVYANGGKGFCKLH

SEQ ID NO: 15445 - protein, 25 aa, synthetic construct
  REGION 1..25: note = Description of Artificial Sequence: Synthetic peptide
GVRRSFYVYANGGKGFCKLHNWNCV

SEQ ID NO: 15446 - protein, 25 aa, synthetic construct
  REGION 1..25: note = Description of Artificial Sequence: Synthetic peptide
IVNGVRRSFYVYANGGKGFCKLHNW

SEQ ID NO: 15447 - protein, 25 aa, synthetic construct
  REGION 1..25: note = Description of Artificial Sequence: Synthetic peptide
NGVRRSFYVYANGGKGFCKLHNWNC

SEQ ID NO: 15448 - protein, 25 aa, synthetic construct
  REGION 1..25: note = Description of Artificial Sequence: Synthetic peptide
VNGVRRSFYVYANGGKGFCKLHNWN

SEQ ID NO: 15449 - protein, 25 aa, synthetic construct
  REGION 1..25: note = Description of Artificial Sequence: Synthetic peptide
TIVNGVRRSFYVYANGGKGFCKLHN

SEQ ID NO: 15450 - protein, 25 aa, synthetic construct
  REGION 1..25: note = Description of Artificial Sequence: Synthetic peptide
ARAGKASCTLSEQLDFIDTKRGVYC

SEQ ID NO: 15451 - protein, 25 aa, synthetic construct
  REGION 1..25: note = Description of Artificial Sequence: Synthetic peptide
RAGKASCTLSEQLDFIDTKRGVYCC

SEQ ID NO: 15452 - protein, 25 aa, synthetic construct
  REGION 1..25: note = Description of Artificial Sequence: Synthetic peptide
LARAGKASCTLSEQLDFIDTKRGVY

SEQ ID NO: 15453 - protein, 25 aa, synthetic construct
  REGION 1..25: note = Description of Artificial Sequence: Synthetic peptide
TKKAGGTTEMLAKALRKVPTDNYIT

SEQ ID NO: 15454 - protein, 25 aa, synthetic construct
  REGION 1..25: note = Description of Artificial Sequence: Synthetic peptide
KAGGTTEMLAKALRKVPTDNYITTY

SEQ ID NO: 15455 - protein, 25 aa, synthetic construct
  REGION 1..25: note = Description of Artificial Sequence: Synthetic peptide
VIPTKKAGGTTEMLAKALRKVPTDN

SEQ ID NO: 15456 - protein, 25 aa, synthetic construct
  REGION 1..25: note = Description of Artificial Sequence: Synthetic peptide
IPTKKAGGTTEMLAKALRKVPTDNY

SEQ ID NO: 15457 - protein, 25 aa, synthetic construct
  REGION 1..25: note = Description of Artificial Sequence: Synthetic peptide
KKAGGTTEMLAKALRKVPTDNYITT

SEQ ID NO: 15458 - protein, 25 aa, synthetic construct
  REGION 1..25: note = Description of Artificial Sequence: Synthetic peptide
AGGTTEMLAKALRKVPTDNYITTYP

SEQ ID NO: 15459 - protein, 25 aa, synthetic construct
  REGION 1..25: note = Description of Artificial Sequence: Synthetic peptide
PTKKAGGTTEMLAKALRKVPTDNYI

SEQ ID NO: 15460 - protein, 25 aa, synthetic construct
  REGION 1..25: note = Description of Artificial Sequence: Synthetic peptide
LLTLQQIELKFNPPALQDAYYRARA

SEQ ID NO: 15461 - protein, 25 aa, synthetic construct
  REGION 1..25: note = Description of Artificial Sequence: Synthetic peptide
QKIAEIPKEEVKPFITESKPSVEQR

SEQ ID NO: 15462 - protein, 25 aa, synthetic construct
  REGION 1..25: note = Description of Artificial Sequence: Synthetic peptide
YFYTSKTTVASLINTLNDLNETLVT

SEQ ID NO: 15463 - protein, 25 aa, synthetic construct
  REGION 1..25: note = Description of Artificial Sequence: Synthetic peptide
GDIILKPANNSLKITEEVGHTDLMA

SEQ ID NO: 15464 - protein, 25 aa, synthetic construct
  REGION 1..25: note = Description of Artificial Sequence: Synthetic peptide
SGKPVPYCYDTNVLEGSVAYESLRP

SEQ ID NO: 15465 - protein, 25 aa, synthetic construct
  REGION 1..25: note = Description of Artificial Sequence: Synthetic peptide
VNSFSGYLKLTDNVYIKNADIVEEA

SEQ ID NO: 15466 - protein, 25 aa, synthetic construct
  REGION 1..25: note = Description of Artificial Sequence: Synthetic peptide
NSFSGYLKLTDNVYIKNADIVEEAK

SEQ ID NO: 15467 - protein, 25 aa, synthetic construct
  REGION 1..25: note = Description of Artificial Sequence: Synthetic peptide
SVVLLSVLQQLRVESSSKLWAQCVQ

SEQ ID NO: 15468 - protein, 25 aa, synthetic construct
  REGION 1..25: note = Description of Artificial Sequence: Synthetic peptide
PPQTSITSAVLQSGFRKMAFPSGKV

SEQ ID NO: 15469 - protein, 25 aa, synthetic construct
  REGION 1..25: note = Description of Artificial Sequence: Synthetic peptide
GLVEVEKGVLPQLEQPYVFIKRSDA

SEQ ID NO: 15470 - protein, 25 aa, synthetic construct
  REGION 1..25: note = Description of Artificial Sequence: Synthetic peptide
CGLVEVEKGVLPQLEQPYVFIKRSD

SEQ ID NO: 15471 - protein, 25 aa, synthetic construct
  REGION 1..25: note = Description of Artificial Sequence: Synthetic peptide
LVEVEKGVLPQLEQPYVFIKRSDAR

SEQ ID NO: 15472 - protein, 25 aa, synthetic construct
  REGION 1..25: note = Description of Artificial Sequence: Synthetic peptide
TCGLVEVEKGVLPQLEQPYVFIKRS

SEQ ID NO: 15473 - protein, 25 aa, synthetic construct
  REGION 1..25: note = Description of Artificial Sequence: Synthetic peptide
SLPVLQVRDVLVRGFGDSVEEVLSE

SEQ ID NO: 15474 - protein, 25 aa, synthetic construct
  REGION 1..25: note = Description of Artificial Sequence: Synthetic peptide
LPVLQVRDVLVRGFGDSVEEVLSEA

SEQ ID NO: 15475 - protein, 25 aa, synthetic construct
  REGION 1..25: note = Description of Artificial Sequence: Synthetic peptide
RSFYVYANGGKGFCKLHNWNCVNCD

SEQ ID NO: 15476 - protein, 25 aa, synthetic construct
  REGION 1..25: note = Description of Artificial Sequence: Synthetic peptide
VTRCLNRVCTNYMPYFFTLLLQLCT

SEQ ID NO: 15477 - protein, 25 aa, synthetic construct
  REGION 1..25: note = Description of Artificial Sequence: Synthetic peptide
QQIELKFNPPALQDAYYRARAGEAA

SEQ ID NO: 15478 - protein, 25 aa, synthetic construct
  REGION 1..25: note = Description of Artificial Sequence: Synthetic peptide
LQQIELKFNPPALQDAYYRARAGEA

SEQ ID NO: 15479 - protein, 25 aa, synthetic construct
  REGION 1..25: note = Description of Artificial Sequence: Synthetic peptide
LSVLQQLRVESSSKLWAQCVQLHND

SEQ ID NO: 15480 - protein, 25 aa, synthetic construct
  REGION 1..25: note = Description of Artificial Sequence: Synthetic peptide
LLSVLQQLRVESSSKLWAQCVQLHN

SEQ ID NO: 15481 - protein, 25 aa, synthetic construct
  REGION 1..25: note = Description of Artificial Sequence: Synthetic peptide
KKSLNVAKSEFDRDAAMQRKLEKMA

SEQ ID NO: 15482 - protein, 25 aa, synthetic construct
  REGION 1..25: note = Description of Artificial Sequence: Synthetic peptide
KSLNVAKSEFDRDAAMQRKLEKMAD

SEQ ID NO: 15483 - protein, 25 aa, synthetic construct
  REGION 1..25: note = Description of Artificial Sequence: Synthetic peptide
KHSSGVTRELMRELNGGAYTRYVDN

SEQ ID NO: 15484 - protein, 25 aa, synthetic construct
  REGION 1..25: note = Description of Artificial Sequence: Synthetic peptide
NTKHSSGVTRELMRELNGGAYTRYV

SEQ ID NO: 15485 - protein, 25 aa, synthetic construct
  REGION 1..25: note = Description of Artificial Sequence: Synthetic peptide
TKHSSGVTRELMRELNGGAYTRYVD

SEQ ID NO: 15486 - protein, 25 aa, synthetic construct
  REGION 1..25: note = Description of Artificial Sequence: Synthetic peptide
TERSEKSYELQTPFEIKLAKKFDTF

SEQ ID NO: 15487 - protein, 25 aa, synthetic construct
  REGION 1..25: note = Description of Artificial Sequence: Synthetic peptide
EAARVVRSIFSRTLETAQNSVRVLQ

SEQ ID NO: 15488 - protein, 25 aa, synthetic construct
  REGION 1..25: note = Description of Artificial Sequence: Synthetic peptide
EILGTVSWNLREMLAHAEETRKLMP

SEQ ID NO: 15489 - protein, 25 aa, synthetic construct
  REGION 1..25: note = Description of Artificial Sequence: Synthetic peptide
KQEILGTVSWNLREMLAHAEETRKL

SEQ ID NO: 15490 - protein, 25 aa, synthetic construct
  REGION 1..25: note = Description of Artificial Sequence: Synthetic peptide
QEILGTVSWNLREMLAHAEETRKLM

SEQ ID NO: 15491 - protein, 25 aa, synthetic construct
  REGION 1..25: note = Description of Artificial Sequence: Synthetic peptide
ILGTVSWNLREMLAHAEETRKLMPV

SEQ ID NO: 15492 - protein, 25 aa, synthetic construct
  REGION 1..25: note = Description of Artificial Sequence: Synthetic peptide
EKQEILGTVSWNLREMLAHAEETRK

SEQ ID NO: 15493 - protein, 25 aa, synthetic construct
  REGION 1..25: note = Description of Artificial Sequence: Synthetic peptide
GARFYFYTSKTTVASLINTLNDLNE

SEQ ID NO: 15494 - protein, 25 aa, synthetic construct
  REGION 1..25: note = Description of Artificial Sequence: Synthetic peptide
KKLKKSLNVAKSEFDRDAAMQRKLE

SEQ ID NO: 15495 - protein, 25 aa, synthetic construct
  REGION 1..25: note = Description of Artificial Sequence: Synthetic peptide
LKKLKKSLNVAKSEFDRDAAMQRKL

SEQ ID NO: 15496 - protein, 25 aa, synthetic construct
  REGION 1..25: note = Description of Artificial Sequence: Synthetic peptide
DVFHLYLQYIRKLHDELTGHMLDMY

SEQ ID NO: 15497 - protein, 25 aa, synthetic construct
  REGION 1..25: note = Description of Artificial Sequence: Synthetic peptide
VTFFPDLNGDVVAIDYKHYTPSFKK

SEQ ID NO: 15498 - protein, 25 aa, synthetic construct
  REGION 1..25: note = Description of Artificial Sequence: Synthetic peptide
HEIAWYTERSEKSYELQTPFEIKLA

SEQ ID NO: 15499 - protein, 25 aa, synthetic construct
  REGION 1..25: note = Description of Artificial Sequence: Synthetic peptide
TEVNEFACVVADAVIKTLQPVSELL

SEQ ID NO: 15500 - protein, 25 aa, synthetic construct
  REGION 1..25: note = Description of Artificial Sequence: Synthetic peptide
LLNKEMYLKLRSDVLLPLTQYNRYL

SEQ ID NO: 15501 - protein, 25 aa, synthetic construct
  REGION 1..25: note = Description of Artificial Sequence: Synthetic peptide
TFLLNKEMYLKLRSDVLLPLTQYNR

SEQ ID NO: 15502 - protein, 25 aa, synthetic construct
  REGION 1..25: note = Description of Artificial Sequence: Synthetic peptide
FLLNKEMYLKLRSDVLLPLTQYNRY

SEQ ID NO: 15503 - protein, 25 aa, synthetic construct
  REGION 1..25: note = Description of Artificial Sequence: Synthetic peptide
PNPKGFCDLKGKYVQIPTTCANDPV

SEQ ID NO: 15504 - protein, 25 aa, synthetic construct
  REGION 1..25: note = Description of Artificial Sequence: Synthetic peptide
TYYLFDESGEFKLASHMYCSFYPPD

SEQ ID NO: 15505 - protein, 25 aa, synthetic construct
  REGION 1..25: note = Description of Artificial Sequence: Synthetic peptide
GVDAVNLLTNMFTPLIQPIGALDIS

SEQ ID NO: 15506 - protein, 25 aa, synthetic construct
  REGION 1..25: note = Description of Artificial Sequence: Synthetic peptide
CGVDAVNLLTNMFTPLIQPIGALDI

SEQ ID NO: 15507 - protein, 25 aa, synthetic construct
  REGION 1..25: note = Description of Artificial Sequence: Synthetic peptide
FCGVDAVNLLTNMFTPLIQPIGALD

SEQ ID NO: 15508 - protein, 25 aa, synthetic construct
  REGION 1..25: note = Description of Artificial Sequence: Synthetic peptide
DAVNLLTNMFTPLIQPIGALDISAS

SEQ ID NO: 15509 - protein, 25 aa, synthetic construct
  REGION 1..25: note = Description of Artificial Sequence: Synthetic peptide
VDAVNLLTNMFTPLIQPIGALDISA

SEQ ID NO: 15510 - protein, 25 aa, synthetic construct
  REGION 1..25: note = Description of Artificial Sequence: Synthetic peptide
GAKLKALNLGETFVTHSKGLYRKCV

SEQ ID NO: 15511 - protein, 25 aa, synthetic construct
  REGION 1..25: note = Description of Artificial Sequence: Synthetic peptide
GGAKLKALNLGETFVTHSKGLYRKC

SEQ ID NO: 15512 - protein, 25 aa, synthetic construct
  REGION 1..25: note = Description of Artificial Sequence: Synthetic peptide
IELKFNPPALQDAYYRARAGEAANF

SEQ ID NO: 15513 - protein, 25 aa, synthetic construct
  REGION 1..25: note = Description of Artificial Sequence: Synthetic peptide
QIELKFNPPALQDAYYRARAGEAAN

SEQ ID NO: 15514 - protein, 25 aa, synthetic construct
  REGION 1..25: note = Description of Artificial Sequence: Synthetic peptide
SCNNYMLTYNKVENMTPRDLGACID

SEQ ID NO: 15515 - protein, 25 aa, synthetic construct
  REGION 1..25: note = Description of Artificial Sequence: Synthetic peptide
AFEKMVSLLSVLLSMQGAVDINKLC

SEQ ID NO: 15516 - protein, 25 aa, synthetic construct
  REGION 1..25: note = Description of Artificial Sequence: Synthetic peptide
EAFEKMVSLLSVLLSMQGAVDINKL

SEQ ID NO: 15517 - protein, 25 aa, synthetic construct
  REGION 1..25: note = Description of Artificial Sequence: Synthetic peptide
FEKMVSLLSVLLSMQGAVDINKLCE

SEQ ID NO: 15518 - protein, 25 aa, synthetic construct
  REGION 1..25: note = Description of Artificial Sequence: Synthetic peptide
QEGVVDYGARFYFYTSKTTVASLIN

SEQ ID NO: 15519 - protein, 25 aa, synthetic construct
  REGION 1..25: note = Description of Artificial Sequence: Synthetic peptide
DTIANYAKPFLNKVVSTTTNIVTRC

SEQ ID NO: 15520 - protein, 25 aa, synthetic construct
  REGION 1..25: note = Description of Artificial Sequence: Synthetic peptide
WDTIANYAKPFLNKVVSTTTNIVTR

SEQ ID NO: 15521 - protein, 25 aa, synthetic construct
  REGION 1..25: note = Description of Artificial Sequence: Synthetic peptide
GTGQAITVTPEANMDQESFGGASCC

SEQ ID NO: 15522 - protein, 25 aa, synthetic construct
  REGION 1..25: note = Description of Artificial Sequence: Synthetic peptide
AQEAYEQAVANGDSEVVLKKLKKSL

SEQ ID NO: 15523 - protein, 25 aa, synthetic construct
  REGION 1..25: note = Description of Artificial Sequence: Synthetic peptide
RYMSALNHTKKWKYPQVNGLTSIKW

SEQ ID NO: 15524 - protein, 25 aa, synthetic construct
  REGION 1..25: note = Description of Artificial Sequence: Synthetic peptide
VLECNVKTTEVVGDIILKPANNSLK

SEQ ID NO: 15525 - protein, 25 aa, synthetic construct
  REGION 1..25: note = Description of Artificial Sequence: Synthetic peptide
LECNVKTTEVVGDIILKPANNSLKI

SEQ ID NO: 15526 - protein, 25 aa, synthetic construct
  REGION 1..25: note = Description of Artificial Sequence: Synthetic peptide
GRYMSALNHTKKWKYPQVNGLTSIK

SEQ ID NO: 15527 - protein, 25 aa, synthetic construct
  REGION 1..25: note = Description of Artificial Sequence: Synthetic peptide
SEDMLNPNYEDLLIRKSNHNFLVQA

SEQ ID NO: 15528 - protein, 25 aa, synthetic construct
  REGION 1..25: note = Description of Artificial Sequence: Synthetic peptide
GDVVAIDYKHYTPSFKKGAKLLHKP

SEQ ID NO: 15529 - protein, 25 aa, synthetic construct
  REGION 1..25: note = Description of Artificial Sequence: Synthetic peptide
CVNCDTFCAGSTFISDEVARDLSLQ

SEQ ID NO: 15530 - protein, 25 aa, synthetic construct
  REGION 1..25: note = Description of Artificial Sequence: Synthetic peptide
YGARFYFYTSKTTVASLINTLNDLN

SEQ ID NO: 15531 - protein, 25 aa, synthetic construct
  REGION 1..25: note = Description of Artificial Sequence: Synthetic peptide
SSFLEMKSEKQVEQKIAEIPKEEVK

SEQ ID NO: 15532 - protein, 25 aa, synthetic construct
  REGION 1..25: note = Description of Artificial Sequence: Synthetic peptide
VTCAKEIKESVQTFFKLVNKFLALC

SEQ ID NO: 15533 - protein, 25 aa, synthetic construct
  REGION 1..25: note = Description of Artificial Sequence: Synthetic peptide
TCAKEIKESVQTFFKLVNKFLALCA

SEQ ID NO: 15534 - protein, 25 aa, synthetic construct
  REGION 1..25: note = Description of Artificial Sequence: Synthetic peptide
EAYEQAVANGDSEVVLKKLKKSLNV

SEQ ID NO: 15535 - protein, 25 aa, synthetic construct
  REGION 1..25: note = Description of Artificial Sequence: Synthetic peptide
YEQAVANGDSEVVLKKLKKSLNVAK

SEQ ID NO: 15536 - protein, 25 aa, synthetic construct
  REGION 1..25: note = Description of Artificial Sequence: Synthetic peptide
AYEQAVANGDSEVVLKKLKKSLNVA

SEQ ID NO: 15537 - protein, 25 aa, synthetic construct
  REGION 1..25: note = Description of Artificial Sequence: Synthetic peptide
QYELKHGTFTCASEYTGNYQCGHYK

SEQ ID NO: 15538 - protein, 25 aa, synthetic construct
  REGION 1..25: note = Description of Artificial Sequence: Synthetic peptide
ELKHGTFTCASEYTGNYQCGHYKHI

SEQ ID NO: 15539 - protein, 25 aa, synthetic construct
  REGION 1..25: note = Description of Artificial Sequence: Synthetic peptide
YELKHGTFTCASEYTGNYQCGHYKH

SEQ ID NO: 15540 - protein, 25 aa, synthetic construct
  REGION 1..25: note = Description of Artificial Sequence: Synthetic peptide
LKHGTFTCASEYTGNYQCGHYKHIT

SEQ ID NO: 15541 - protein, 25 aa, synthetic construct
  REGION 1..25: note = Description of Artificial Sequence: Synthetic peptide
INAQVAKSHNIALIWNVKDFMSLSE

SEQ ID NO: 15542 - protein, 25 aa, synthetic construct
  REGION 1..25: note = Description of Artificial Sequence: Synthetic peptide
AQNSVRVLQKAAITILDGISQYSLR

SEQ ID NO: 15543 - protein, 25 aa, synthetic construct
  REGION 1..25: note = Description of Artificial Sequence: Synthetic peptide
QMAPISAMVRMYIFFASFYYVWKSY

SEQ ID NO: 15544 - protein, 25 aa, synthetic construct
  REGION 1..25: note = Description of Artificial Sequence: Synthetic peptide
MAPISAMVRMYIFFASFYYVWKSYV

SEQ ID NO: 15545 - protein, 25 aa, synthetic construct
  REGION 1..25: note = Description of Artificial Sequence: Synthetic peptide
LIINLVQMAPISAMVRMYIFFASFY

SEQ ID NO: 15546 - protein, 25 aa, synthetic construct
  REGION 1..25: note = Description of Artificial Sequence: Synthetic peptide
VQMAPISAMVRMYIFFASFYYVWKS

SEQ ID NO: 15547 - protein, 25 aa, synthetic construct
  REGION 1..25: note = Description of Artificial Sequence: Synthetic peptide
NLVQMAPISAMVRMYIFFASFYYVW

SEQ ID NO: 15548 - protein, 25 aa, synthetic construct
  REGION 1..25: note = Description of Artificial Sequence: Synthetic peptide
INLVQMAPISAMVRMYIFFASFYYV

SEQ ID NO: 15549 - protein, 25 aa, synthetic construct
  REGION 1..25: note = Description of Artificial Sequence: Synthetic peptide
IINLVQMAPISAMVRMYIFFASFYY

SEQ ID NO: 15550 - protein, 25 aa, synthetic construct
  REGION 1..25: note = Description of Artificial Sequence: Synthetic peptide
WLIINLVQMAPISAMVRMYIFFASF

SEQ ID NO: 15551 - protein, 25 aa, synthetic construct
  REGION 1..25: note = Description of Artificial Sequence: Synthetic peptide
LVQMAPISAMVRMYIFFASFYYVWK

SEQ ID NO: 15552 - protein, 25 aa, synthetic construct
  REGION 1..25: note = Description of Artificial Sequence: Synthetic peptide
TGDLQPLEQPTSEAVEAPLVGTPVC

SEQ ID NO: 15553 - protein, 25 aa, synthetic construct
  REGION 1..25: note = Description of Artificial Sequence: Synthetic peptide
LLEDEFTPFDVVRQCSGVTFQSAVK

SEQ ID NO: 15554 - protein, 25 aa, synthetic construct
  REGION 1..25: note = Description of Artificial Sequence: Synthetic peptide
ALLEDEFTPFDVVRQCSGVTFQSAV

SEQ ID NO: 15555 - protein, 25 aa, synthetic construct
  REGION 1..25: note = Description of Artificial Sequence: Synthetic peptide
LEDEFTPFDVVRQCSGVTFQSAVKR

SEQ ID NO: 15556 - protein, 25 aa, synthetic construct
  REGION 1..25: note = Description of Artificial Sequence: Synthetic peptide
SALLEDEFTPFDVVRQCSGVTFQSA

SEQ ID NO: 15557 - protein, 25 aa, synthetic construct
  REGION 1..25: note = Description of Artificial Sequence: Synthetic peptide
SCKRVLNVVCKTCGQQQTTLKGVEA

SEQ ID NO: 15558 - protein, 25 aa, synthetic construct
  REGION 1..25: note = Description of Artificial Sequence: Synthetic peptide
LNHTKKWKYPQVNGLTSIKWADNNC

SEQ ID NO: 15559 - protein, 25 aa, synthetic construct
  REGION 1..25: note = Description of Artificial Sequence: Synthetic peptide
NHTKKWKYPQVNGLTSIKWADNNCY

SEQ ID NO: 15560 - protein, 25 aa, synthetic construct
  REGION 1..25: note = Description of Artificial Sequence: Synthetic peptide
ALNHTKKWKYPQVNGLTSIKWADNN

SEQ ID NO: 15561 - protein, 25 aa, synthetic construct
  REGION 1..25: note = Description of Artificial Sequence: Synthetic peptide
ASWVMRIMTWLDMVDTSLSGFKLKD

SEQ ID NO: 15562 - protein, 25 aa, synthetic construct
  REGION 1..25: note = Description of Artificial Sequence: Synthetic peptide
PASWVMRIMTWLDMVDTSLSGFKLK

SEQ ID NO: 15563 - protein, 25 aa, synthetic construct
  REGION 1..25: note = Description of Artificial Sequence: Synthetic peptide
QVEQKIAEIPKEEVKPFITESKPSV

SEQ ID NO: 15564 - protein, 25 aa, synthetic construct
  REGION 1..25: note = Description of Artificial Sequence: Synthetic peptide
VEQKIAEIPKEEVKPFITESKPSVE

SEQ ID NO: 15565 - protein, 25 aa, synthetic construct
  REGION 1..25: note = Description of Artificial Sequence: Synthetic peptide
KQVEQKIAEIPKEEVKPFITESKPS

SEQ ID NO: 15566 - protein, 25 aa, synthetic construct
  REGION 1..25: note = Description of Artificial Sequence: Synthetic peptide
DWLEEKFKEGVEFLRDGWEIVKFIS

SEQ ID NO: 15567 - protein, 25 aa, synthetic construct
  REGION 1..25: note = Description of Artificial Sequence: Synthetic peptide
PVLDWLEEKFKEGVEFLRDGWEIVK

SEQ ID NO: 15568 - protein, 25 aa, synthetic construct
  REGION 1..25: note = Description of Artificial Sequence: Synthetic peptide
KPVLDWLEEKFKEGVEFLRDGWEIV

SEQ ID NO: 15569 - protein, 25 aa, synthetic construct
  REGION 1..25: note = Description of Artificial Sequence: Synthetic peptide
LDWLEEKFKEGVEFLRDGWEIVKFI

SEQ ID NO: 15570 - protein, 25 aa, synthetic construct
  REGION 1..25: note = Description of Artificial Sequence: Synthetic peptide
VLDWLEEKFKEGVEFLRDGWEIVKF

SEQ ID NO: 15571 - protein, 25 aa, synthetic construct
  REGION 1..25: note = Description of Artificial Sequence: Synthetic peptide
EHFIETISLAGSYKDWSYSGQSTQL

SEQ ID NO: 15572 - protein, 25 aa, synthetic construct
  REGION 1..25: note = Description of Artificial Sequence: Synthetic peptide
HFIETISLAGSYKDWSYSGQSTQLG

SEQ ID NO: 15573 - protein, 25 aa, synthetic construct
  REGION 1..25: note = Description of Artificial Sequence: Synthetic peptide
EEHFIETISLAGSYKDWSYSGQSTQ

SEQ ID NO: 15574 - protein, 25 aa, synthetic construct
  REGION 1..25: note = Description of Artificial Sequence: Synthetic peptide
ADIVEEAKKVKPTVVVNAANVYLKH

SEQ ID NO: 15575 - protein, 25 aa, synthetic construct
  REGION 1..25: note = Description of Artificial Sequence: Synthetic peptide
ECNVKTTEVVGDIILKPANNSLKIT

SEQ ID NO: 15576 - protein, 25 aa, synthetic construct
  REGION 1..25: note = Description of Artificial Sequence: Synthetic peptide
NVKTTEVVGDIILKPANNSLKITEE

SEQ ID NO: 15577 - protein, 25 aa, synthetic construct
  REGION 1..25: note = Description of Artificial Sequence: Synthetic peptide
CNVKTTEVVGDIILKPANNSLKITE

SEQ ID NO: 15578 - protein, 25 aa, synthetic construct
  REGION 1..25: note = Description of Artificial Sequence: Synthetic peptide
IDTKRGVYCCREHEHEIAWYTERSE

SEQ ID NO: 15579 - protein, 25 aa, synthetic construct
  REGION 1..25: note = Description of Artificial Sequence: Synthetic peptide
FIDTKRGVYCCREHEHEIAWYTERS

SEQ ID NO: 15580 - protein, 25 aa, synthetic construct
  REGION 1..25: note = Description of Artificial Sequence: Synthetic peptide
LDFIDTKRGVYCCREHEHEIAWYTE

SEQ ID NO: 15581 - protein, 25 aa, synthetic construct
  REGION 1..25: note = Description of Artificial Sequence: Synthetic peptide
DFIDTKRGVYCCREHEHEIAWYTER

SEQ ID NO: 15582 - protein, 25 aa, synthetic construct
  REGION 1..25: note = Description of Artificial Sequence: Synthetic peptide
QLDFIDTKRGVYCCREHEHEIAWYT

SEQ ID NO: 15583 - protein, 25 aa, synthetic construct
  REGION 1..25: note = Description of Artificial Sequence: Synthetic peptide
RIMTWLDMVDTSLSGFKLKDCVMYA

SEQ ID NO: 15584 - protein, 25 aa, synthetic construct
  REGION 1..25: note = Description of Artificial Sequence: Synthetic peptide
IMTWLDMVDTSLSGFKLKDCVMYAS

SEQ ID NO: 15585 - protein, 25 aa, synthetic construct
  REGION 1..25: note = Description of Artificial Sequence: Synthetic peptide
MRIMTWLDMVDTSLSGFKLKDCVMY

SEQ ID NO: 15586 - protein, 25 aa, synthetic construct
  REGION 1..25: note = Description of Artificial Sequence: Synthetic peptide
YRKCVKSREETGLLMPLKAPKEIIF

SEQ ID NO: 15587 - protein, 25 aa, synthetic construct
  REGION 1..25: note = Description of Artificial Sequence: Synthetic peptide
KCVKSREETGLLMPLKAPKEIIFLE

SEQ ID NO: 15588 - protein, 25 aa, synthetic construct
  REGION 1..25: note = Description of Artificial Sequence: Synthetic peptide
GLYRKCVKSREETGLLMPLKAPKEI

SEQ ID NO: 15589 - protein, 25 aa, synthetic construct
  REGION 1..25: note = Description of Artificial Sequence: Synthetic peptide
CVKSREETGLLMPLKAPKEIIFLEG

SEQ ID NO: 15590 - protein, 25 aa, synthetic construct
  REGION 1..25: note = Description of Artificial Sequence: Synthetic peptide
RKCVKSREETGLLMPLKAPKEIIFL

SEQ ID NO: 15591 - protein, 25 aa, synthetic construct
  REGION 1..25: note = Description of Artificial Sequence: Synthetic peptide
LYRKCVKSREETGLLMPLKAPKEII

SEQ ID NO: 15592 - protein, 25 aa, synthetic construct
  REGION 1..25: note = Description of Artificial Sequence: Synthetic peptide
DYKAFKQIVESCGNFKVTKGKAKKG

SEQ ID NO: 15593 - protein, 25 aa, synthetic construct
  REGION 1..25: note = Description of Artificial Sequence: Synthetic peptide
YKAFKQIVESCGNFKVTKGKAKKGA

SEQ ID NO: 15594 - protein, 25 aa, synthetic construct
  REGION 1..25: note = Description of Artificial Sequence: Synthetic peptide
KAFKQIVESCGNFKVTKGKAKKGAW

SEQ ID NO: 15595 - protein, 25 aa, synthetic construct
  REGION 1..25: note = Description of Artificial Sequence: Synthetic peptide
FCAGSTFISDEVARDLSLQFKRPIN

SEQ ID NO: 15596 - protein, 25 aa, synthetic construct
  REGION 1..25: note = Description of Artificial Sequence: Synthetic peptide
DTFCAGSTFISDEVARDLSLQFKRP

SEQ ID NO: 15597 - protein, 25 aa, synthetic construct
  REGION 1..25: note = Description of Artificial Sequence: Synthetic peptide
TFCAGSTFISDEVARDLSLQFKRPI

SEQ ID NO: 15598 - protein, 25 aa, synthetic construct
  REGION 1..25: note = Description of Artificial Sequence: Synthetic peptide
INGLMLLEIKDTEKYCALAPNMMVT

SEQ ID NO: 15599 - protein, 25 aa, synthetic construct
  REGION 1..25: note = Description of Artificial Sequence: Synthetic peptide
NGLMLLEIKDTEKYCALAPNMMVTN

SEQ ID NO: 15600 - protein, 25 aa, synthetic construct
  REGION 1..25: note = Description of Artificial Sequence: Synthetic peptide
LNDNLLEILQKEKVNINIVGDFKLN

SEQ ID NO: 15601 - protein, 25 aa, synthetic construct
  REGION 1..25: note = Description of Artificial Sequence: Synthetic peptide
NLLEILQKEKVNINIVGDFKLNEEI

SEQ ID NO: 15602 - protein, 25 aa, synthetic construct
  REGION 1..25: note = Description of Artificial Sequence: Synthetic peptide
NDNLLEILQKEKVNINIVGDFKLNE

SEQ ID NO: 15603 - protein, 25 aa, synthetic construct
  REGION 1..25: note = Description of Artificial Sequence: Synthetic peptide
GLNDNLLEILQKEKVNINIVGDFKL

SEQ ID NO: 15604 - protein, 25 aa, synthetic construct
  REGION 1..25: note = Description of Artificial Sequence: Synthetic peptide
DNLLEILQKEKVNINIVGDFKLNEE

SEQ ID NO: 15605 - protein, 25 aa, synthetic construct
  REGION 1..25: note = Description of Artificial Sequence: Synthetic peptide
GPLSAQTGIAVLDMCASLKELLQNG

SEQ ID NO: 15606 - protein, 25 aa, synthetic construct
  REGION 1..25: note = Description of Artificial Sequence: Synthetic peptide
PLSAQTGIAVLDMCASLKELLQNGM

SEQ ID NO: 15607 - protein, 25 aa, synthetic construct
  REGION 1..25: note = Description of Artificial Sequence: Synthetic peptide
GADVTKIKPHNSHEGKTFYVLPNDD

SEQ ID NO: 15608 - protein, 25 aa, synthetic construct
  REGION 1..25: note = Description of Artificial Sequence: Synthetic peptide
TIANYAKPFLNKVVSTTTNIVTRCL

SEQ ID NO: 15609 - protein, 25 aa, synthetic construct
  REGION 1..25: note = Description of Artificial Sequence: Synthetic peptide
DMCASLKELLQNGMNGRTILGSALL

SEQ ID NO: 15610 - protein, 25 aa, synthetic construct
  REGION 1..25: note = Description of Artificial Sequence: Synthetic peptide
ATAQEAYEQAVANGDSEVVLKKLKK

SEQ ID NO: 15611 - protein, 25 aa, synthetic construct
  REGION 1..25: note = Description of Artificial Sequence: Synthetic peptide
FATAQEAYEQAVANGDSEVVLKKLK

SEQ ID NO: 15612 - protein, 25 aa, synthetic construct
  REGION 1..25: note = Description of Artificial Sequence: Synthetic peptide
YFCTCYFGLFCLLNRYFRLTLGVYD

SEQ ID NO: 15613 - protein, 25 aa, synthetic construct
  REGION 1..25: note = Description of Artificial Sequence: Synthetic peptide
GYFCTCYFGLFCLLNRYFRLTLGVY

SEQ ID NO: 15614 - protein, 25 aa, synthetic construct
  REGION 1..25: note = Description of Artificial Sequence: Synthetic peptide
TLLTKGTLEPEYFNSVCRLMKTIGP

SEQ ID NO: 15615 - protein, 25 aa, synthetic construct
  REGION 1..25: note = Description of Artificial Sequence: Synthetic peptide
EPLVDLPIGINITRFQTLLALHRSY

SEQ ID NO: 15616 - protein, 25 aa, synthetic construct
  REGION 1..25: note = Description of Artificial Sequence: Synthetic peptide
PLVDLPIGINITRFQTLLALHRSYL

SEQ ID NO: 15617 - protein, 25 aa, synthetic construct
  REGION 1..25: note = Description of Artificial Sequence: Synthetic peptide
NLWNTFTRLQSLENVAFNVVNKGHF

SEQ ID NO: 15618 - protein, 25 aa, synthetic construct
  REGION 1..25: note = Description of Artificial Sequence: Synthetic peptide
LAKRFKESPFELEDFIPMDSTVKNY

SEQ ID NO: 15619 - protein, 25 aa, synthetic construct
  REGION 1..25: note = Description of Artificial Sequence: Synthetic peptide
KRFKESPFELEDFIPMDSTVKNYFI

SEQ ID NO: 15620 - protein, 25 aa, synthetic construct
  REGION 1..25: note = Description of Artificial Sequence: Synthetic peptide
AKRFKESPFELEDFIPMDSTVKNYF

SEQ ID NO: 15621 - protein, 25 aa, synthetic construct
  REGION 1..25: note = Description of Artificial Sequence: Synthetic peptide
CFVDDIVKTDGTLMIERFVSLAIDA

SEQ ID NO: 15622 - protein, 25 aa, synthetic construct
  REGION 1..25: note = Description of Artificial Sequence: Synthetic peptide
LWNTFTRLQSLENVAFNVVNKGHFD

SEQ ID NO: 15623 - protein, 25 aa, synthetic construct
  REGION 1..25: note = Description of Artificial Sequence: Synthetic peptide
TFTRLQSLENVAFNVVNKGHFDGQQ

SEQ ID NO: 15624 - protein, 25 aa, synthetic construct
  REGION 1..25: note = Description of Artificial Sequence: Synthetic peptide
FKELLVYAADPAMHAASGNLLLDKR

SEQ ID NO: 15625 - protein, 25 aa, synthetic construct
  REGION 1..25: note = Description of Artificial Sequence: Synthetic peptide
LYALVYFLQSINFVRIIMRLWLCWK

SEQ ID NO: 15626 - protein, 25 aa, synthetic construct
  REGION 1..25: note = Description of Artificial Sequence: Synthetic peptide
VLPFNDGVYFASTEKSNIIRGWIFG

SEQ ID NO: 15627 - protein, 25 aa, synthetic construct
  REGION 1..25: note = Description of Artificial Sequence: Synthetic peptide
PVLPFNDGVYFASTEKSNIIRGWIF

SEQ ID NO: 15628 - protein, 25 aa, synthetic construct
  REGION 1..25: note = Description of Artificial Sequence: Synthetic peptide
LPFNDGVYFASTEKSNIIRGWIFGT

SEQ ID NO: 15629 - protein, 25 aa, synthetic construct
  REGION 1..25: note = Description of Artificial Sequence: Synthetic peptide
NPVLPFNDGVYFASTEKSNIIRGWI

SEQ ID NO: 15630 - protein, 25 aa, synthetic construct
  REGION 1..25: note = Description of Artificial Sequence: Synthetic peptide
DNPVLPFNDGVYFASTEKSNIIRGW

SEQ ID NO: 15631 - protein, 25 aa, synthetic construct
  REGION 1..25: note = Description of Artificial Sequence: Synthetic peptide
RDVDTDFVNEFYAYLRKHFSMMILS

SEQ ID NO: 15632 - protein, 25 aa, synthetic construct
  REGION 1..25: note = Description of Artificial Sequence: Synthetic peptide
SFPQSAPHGVVFLHVTYVPAQEKNF

SEQ ID NO: 15633 - protein, 25 aa, synthetic construct
  REGION 1..25: note = Description of Artificial Sequence: Synthetic peptide
LCEKALKYLPIDKCSRIIPARARVE

SEQ ID NO: 15634 - protein, 25 aa, synthetic construct
  REGION 1..25: note = Description of Artificial Sequence: Synthetic peptide
CEKALKYLPIDKCSRIIPARARVEC

SEQ ID NO: 15635 - protein, 25 aa, synthetic construct
  REGION 1..25: note = Description of Artificial Sequence: Synthetic peptide
AGDYILANTCTERLKLFAAETLKAT

SEQ ID NO: 15636 - protein, 25 aa, synthetic construct
  REGION 1..25: note = Description of Artificial Sequence: Synthetic peptide
ELLVYAADPAMHAASGNLLLDKRTT

SEQ ID NO: 15637 - protein, 25 aa, synthetic construct
  REGION 1..25: note = Description of Artificial Sequence: Synthetic peptide
KLQFTSLEIPRRNVATLQAENVTGL

SEQ ID NO: 15638 - protein, 25 aa, synthetic construct
  REGION 1..25: note = Description of Artificial Sequence: Synthetic peptide
TLEPEYFNSVCRLMKTIGPDMFLGT

SEQ ID NO: 15639 - protein, 25 aa, synthetic construct
  REGION 1..25: note = Description of Artificial Sequence: Synthetic peptide
KEIDRLNEVAKNLNESLIDLQELGK

SEQ ID NO: 15640 - protein, 25 aa, synthetic construct
  REGION 1..25: note = Description of Artificial Sequence: Synthetic peptide
AIATCDWTNAGDYILANTCTERLKL

SEQ ID NO: 15641 - protein, 25 aa, synthetic construct
  REGION 1..25: note = Description of Artificial Sequence: Synthetic peptide
IATCDWTNAGDYILANTCTERLKLF

SEQ ID NO: 15642 - protein, 25 aa, synthetic construct
  REGION 1..25: note = Description of Artificial Sequence: Synthetic peptide
ATCDWTNAGDYILANTCTERLKLFA

SEQ ID NO: 15643 - protein, 25 aa, synthetic construct
  REGION 1..25: note = Description of Artificial Sequence: Synthetic peptide
NAIATCDWTNAGDYILANTCTERLK

SEQ ID NO: 15644 - protein, 25 aa, synthetic construct
  REGION 1..25: note = Description of Artificial Sequence: Synthetic peptide
YNLWNTFTRLQSLENVAFNVVNKGH

SEQ ID NO: 15645 - protein, 25 aa, synthetic construct
  REGION 1..25: note = Description of Artificial Sequence: Synthetic peptide
SLWVYKQFDTYNLWNTFTRLQSLEN

SEQ ID NO: 15646 - protein, 25 aa, synthetic construct
  REGION 1..25: note = Description of Artificial Sequence: Synthetic peptide
GLPYGANKDGIIWVATEGALNTPKD

SEQ ID NO: 15647 - protein, 25 aa, synthetic construct
  REGION 1..25: note = Description of Artificial Sequence: Synthetic peptide
IDRLNEVAKNLNESLIDLQELGKYE

SEQ ID NO: 15648 - protein, 25 aa, synthetic construct
  REGION 1..25: note = Description of Artificial Sequence: Synthetic peptide
VDTVSALVYDNKLKAHKDKSAQCFK

SEQ ID NO: 15649 - protein, 25 aa, synthetic construct
  REGION 1..25: note = Description of Artificial Sequence: Synthetic peptide
PAEIVDTVSALVYDNKLKAHKDKSA

SEQ ID NO: 15650 - protein, 25 aa, synthetic construct
  REGION 1..25: note = Description of Artificial Sequence: Synthetic peptide
VYAADPAMHAASGNLLLDKRTTCFS

SEQ ID NO: 15651 - protein, 25 aa, synthetic construct
  REGION 1..25: note = Description of Artificial Sequence: Synthetic peptide
YAADPAMHAASGNLLLDKRTTCFSV

SEQ ID NO: 15652 - protein, 25 aa, synthetic construct
  REGION 1..25: note = Description of Artificial Sequence: Synthetic peptide
LHSSRLSFKELLVYAADPAMHAASG

SEQ ID NO: 15653 - protein, 25 aa, synthetic construct
  REGION 1..25: note = Description of Artificial Sequence: Synthetic peptide
HSSRLSFKELLVYAADPAMHAASGN

SEQ ID NO: 15654 - protein, 25 aa, synthetic construct
  REGION 1..25: note = Description of Artificial Sequence: Synthetic peptide
EVFNATRFASVYAWNRKRISNCVAD

SEQ ID NO: 15655 - protein, 25 aa, synthetic construct
  REGION 1..25: note = Description of Artificial Sequence: Synthetic peptide
FNATRFASVYAWNRKRISNCVADYS

SEQ ID NO: 15656 - protein, 25 aa, synthetic construct
  REGION 1..25: note = Description of Artificial Sequence: Synthetic peptide
VFNATRFASVYAWNRKRISNCVADY

SEQ ID NO: 15657 - protein, 25 aa, synthetic construct
  REGION 1..25: note = Description of Artificial Sequence: Synthetic peptide
NATRFASVYAWNRKRISNCVADYSV

SEQ ID NO: 15658 - protein, 25 aa, synthetic construct
  REGION 1..25: note = Description of Artificial Sequence: Synthetic peptide
LNGNWYDFGDFIQTTPGSGVPVVDS

SEQ ID NO: 15659 - protein, 25 aa, synthetic construct
  REGION 1..25: note = Description of Artificial Sequence: Synthetic peptide
DLNGNWYDFGDFIQTTPGSGVPVVD

SEQ ID NO: 15660 - protein, 25 aa, synthetic construct
  REGION 1..25: note = Description of Artificial Sequence: Synthetic peptide
NGNWYDFGDFIQTTPGSGVPVVDSY

SEQ ID NO: 15661 - protein, 25 aa, synthetic construct
  REGION 1..25: note = Description of Artificial Sequence: Synthetic peptide
TCCSLSHRFYRLANECAQVLSEMVM

SEQ ID NO: 15662 - protein, 25 aa, synthetic construct
  REGION 1..25: note = Description of Artificial Sequence: Synthetic peptide
CSLSHRFYRLANECAQVLSEMVMCG

SEQ ID NO: 15663 - protein, 25 aa, synthetic construct
  REGION 1..25: note = Description of Artificial Sequence: Synthetic peptide
CCSLSHRFYRLANECAQVLSEMVMC

SEQ ID NO: 15664 - protein, 25 aa, synthetic construct
  REGION 1..25: note = Description of Artificial Sequence: Synthetic peptide
PPPGDQFKHLIPLMYKGLPWNVVRI

SEQ ID NO: 15665 - protein, 25 aa, synthetic construct
  REGION 1..25: note = Description of Artificial Sequence: Synthetic peptide
DNQDLNGNWYDFGDFIQTTPGSGVP

SEQ ID NO: 15666 - protein, 25 aa, synthetic construct
  REGION 1..25: note = Description of Artificial Sequence: Synthetic peptide
SNFRVQPTESIVRFPNITNLCPFGE

SEQ ID NO: 15667 - protein, 25 aa, synthetic construct
  REGION 1..25: note = Description of Artificial Sequence: Synthetic peptide
HTTCCSLSHRFYRLANECAQVLSEM

SEQ ID NO: 15668 - protein, 25 aa, synthetic construct
  REGION 1..25: note = Description of Artificial Sequence: Synthetic peptide
TTCCSLSHRFYRLANECAQVLSEMV

SEQ ID NO: 15669 - protein, 25 aa, synthetic construct
  REGION 1..25: note = Description of Artificial Sequence: Synthetic peptide
LPYGANKDGIIWVATEGALNTPKDH

SEQ ID NO: 15670 - protein, 25 aa, synthetic construct
  REGION 1..25: note = Description of Artificial Sequence: Synthetic peptide
PYGANKDGIIWVATEGALNTPKDHI

SEQ ID NO: 15671 - protein, 25 aa, synthetic construct
  REGION 1..25: note = Description of Artificial Sequence: Synthetic peptide
YGANKDGIIWVATEGALNTPKDHIG

SEQ ID NO: 15672 - protein, 25 aa, synthetic construct
  REGION 1..25: note = Description of Artificial Sequence: Synthetic peptide
GANKDGIIWVATEGALNTPKDHIGT

SEQ ID NO: 15673 - protein, 25 aa, synthetic construct
  REGION 1..25: note = Description of Artificial Sequence: Synthetic peptide
RGTTTYKLNVGDYFVLTSHTVMPLS

SEQ ID NO: 15674 - protein, 25 aa, synthetic construct
  REGION 1..25: note = Description of Artificial Sequence: Synthetic peptide
GTTTYKLNVGDYFVLTSHTVMPLSA

SEQ ID NO: 15675 - protein, 25 aa, synthetic construct
  REGION 1..25: note = Description of Artificial Sequence: Synthetic peptide
LVTLAILTALRLCAYCCNIVNVSLV

SEQ ID NO: 15676 - protein, 25 aa, synthetic construct
  REGION 1..25: note = Description of Artificial Sequence: Synthetic peptide
VTLAILTALRLCAYCCNIVNVSLVK

SEQ ID NO: 15677 - protein, 25 aa, synthetic construct
  REGION 1..25: note = Description of Artificial Sequence: Synthetic peptide
LLQYGSFCTQLNRALTGIAVEQDKN

SEQ ID NO: 15678 - protein, 25 aa, synthetic construct
  REGION 1..25: note = Description of Artificial Sequence: Synthetic peptide
LQYGSFCTQLNRALTGIAVEQDKNT

SEQ ID NO: 15679 - protein, 25 aa, synthetic construct
  REGION 1..25: note = Description of Artificial Sequence: Synthetic peptide
DYPKCDRAMPNMLRIMASLVLARKH

SEQ ID NO: 15680 - protein, 25 aa, synthetic construct
  REGION 1..25: note = Description of Artificial Sequence: Synthetic peptide
ILANTCTERLKLFAAETLKATEETF

SEQ ID NO: 15681 - protein, 25 aa, synthetic construct
  REGION 1..25: note = Description of Artificial Sequence: Synthetic peptide
SGINASVVNIQKEIDRLNEVAKNLN

SEQ ID NO: 15682 - protein, 25 aa, synthetic construct
  REGION 1..25: note = Description of Artificial Sequence: Synthetic peptide
FKVSIWNLDYIINLIIKNLSKSLTE

SEQ ID NO: 15683 - protein, 25 aa, synthetic construct
  REGION 1..25: note = Description of Artificial Sequence: Synthetic peptide
VDGVVQQLPETYFTQSRNLQEFKPR

SEQ ID NO: 15684 - protein, 25 aa, synthetic construct
  REGION 1..25: note = Description of Artificial Sequence: Synthetic peptide
FLHVTYVPAQEKNFTTAPAICHDGK

SEQ ID NO: 15685 - protein, 25 aa, synthetic construct
  REGION 1..25: note = Description of Artificial Sequence: Synthetic peptide
DSNGTITVEELKKLLEQWNLVIGFL

SEQ ID NO: 15686 - protein, 25 aa, synthetic construct
  REGION 1..25: note = Description of Artificial Sequence: Synthetic peptide
ATRFASVYAWNRKRISNCVADYSVL

SEQ ID NO: 15687 - protein, 25 aa, synthetic construct
  REGION 1..25: note = Description of Artificial Sequence: Synthetic peptide
KLDDKDPNFKDQVILLNKHIDAYKT

SEQ ID NO: 15688 - protein, 25 aa, synthetic construct
  REGION 1..25: note = Description of Artificial Sequence: Synthetic peptide
DDKDPNFKDQVILLNKHIDAYKTFP

SEQ ID NO: 15689 - protein, 25 aa, synthetic construct
  REGION 1..25: note = Description of Artificial Sequence: Synthetic peptide
LDDKDPNFKDQVILLNKHIDAYKTF

SEQ ID NO: 15690 - protein, 25 aa, synthetic construct
  REGION 1..25: note = Description of Artificial Sequence: Synthetic peptide
DKDPNFKDQVILLNKHIDAYKTFPP

SEQ ID NO: 15691 - protein, 25 aa, synthetic construct
  REGION 1..25: note = Description of Artificial Sequence: Synthetic peptide
IKLDDKDPNFKDQVILLNKHIDAYK

SEQ ID NO: 15692 - protein, 25 aa, synthetic construct
  REGION 1..25: note = Description of Artificial Sequence: Synthetic peptide
VVQQLPETYFTQSRNLQEFKPRSQM

SEQ ID NO: 15693 - protein, 25 aa, synthetic construct
  REGION 1..25: note = Description of Artificial Sequence: Synthetic peptide
GVVQQLPETYFTQSRNLQEFKPRSQ

SEQ ID NO: 15694 - protein, 25 aa, synthetic construct
  REGION 1..25: note = Description of Artificial Sequence: Synthetic peptide
QQLPETYFTQSRNLQEFKPRSQMEI

SEQ ID NO: 15695 - protein, 25 aa, synthetic construct
  REGION 1..25: note = Description of Artificial Sequence: Synthetic peptide
VQQLPETYFTQSRNLQEFKPRSQME

SEQ ID NO: 15696 - protein, 25 aa, synthetic construct
  REGION 1..25: note = Description of Artificial Sequence: Synthetic peptide
QLPETYFTQSRNLQEFKPRSQMEID

SEQ ID NO: 15697 - protein, 25 aa, synthetic construct
  REGION 1..25: note = Description of Artificial Sequence: Synthetic peptide
LPETYFTQSRNLQEFKPRSQMEIDF

SEQ ID NO: 15698 - protein, 25 aa, synthetic construct
  REGION 1..25: note = Description of Artificial Sequence: Synthetic peptide
SNVTWFHAIHVSGTNGTKRFDNPVL

SEQ ID NO: 15699 - protein, 25 aa, synthetic construct
  REGION 1..25: note = Description of Artificial Sequence: Synthetic peptide
FSNVTWFHAIHVSGTNGTKRFDNPV

SEQ ID NO: 15700 - protein, 25 aa, synthetic construct
  REGION 1..25: note = Description of Artificial Sequence: Synthetic peptide
PFFSNVTWFHAIHVSGTNGTKRFDN

SEQ ID NO: 15701 - protein, 25 aa, synthetic construct
  REGION 1..25: note = Description of Artificial Sequence: Synthetic peptide
FFSNVTWFHAIHVSGTNGTKRFDNP

SEQ ID NO: 15702 - protein, 25 aa, synthetic construct
  REGION 1..25: note = Description of Artificial Sequence: Synthetic peptide
INASVVNIQKEIDRLNEVAKNLNES

SEQ ID NO: 15703 - protein, 25 aa, synthetic construct
  REGION 1..25: note = Description of Artificial Sequence: Synthetic peptide
GINASVVNIQKEIDRLNEVAKNLNE

SEQ ID NO: 15704 - protein, 25 aa, synthetic construct
  REGION 1..25: note = Description of Artificial Sequence: Synthetic peptide
IHADQLTPTWRVYSTGSNVFQTRAG

SEQ ID NO: 15705 - protein, 25 aa, synthetic construct
  REGION 1..25: note = Description of Artificial Sequence: Synthetic peptide
FVENPDILRVYANLGERVRQALLKT

SEQ ID NO: 15706 - protein, 25 aa, synthetic construct
  REGION 1..25: note = Description of Artificial Sequence: Synthetic peptide
DFVENPDILRVYANLGERVRQALLK

SEQ ID NO: 15707 - protein, 25 aa, synthetic construct
  REGION 1..25: note = Description of Artificial Sequence: Synthetic peptide
YDFVENPDILRVYANLGERVRQALL

SEQ ID NO: 15708 - protein, 25 aa, synthetic construct
  REGION 1..25: note = Description of Artificial Sequence: Synthetic peptide
QAWQPGVAMPNLYKMQRMLLEKCDL

SEQ ID NO: 15709 - protein, 25 aa, synthetic construct
  REGION 1..25: note = Description of Artificial Sequence: Synthetic peptide
SQAWQPGVAMPNLYKMQRMLLEKCD

SEQ ID NO: 15710 - protein, 25 aa, synthetic construct
  REGION 1..25: note = Description of Artificial Sequence: Synthetic peptide
LHVTYVPAQEKNFTTAPAICHDGKA

SEQ ID NO: 15711 - protein, 25 aa, synthetic construct
  REGION 1..25: note = Description of Artificial Sequence: Synthetic peptide
TFSNYQHEETIYNLLKDCPAVAKHD

SEQ ID NO: 15712 - protein, 25 aa, synthetic construct
  REGION 1..25: note = Description of Artificial Sequence: Synthetic peptide
FSNYQHEETIYNLLKDCPAVAKHDF

SEQ ID NO: 15713 - protein, 25 aa, synthetic construct
  REGION 1..25: note = Description of Artificial Sequence: Synthetic peptide
VAMPNLYKMQRMLLEKCDLQNYGDS

SEQ ID NO: 15714 - protein, 25 aa, synthetic construct
  REGION 1..25: note = Description of Artificial Sequence: Synthetic peptide
GVAMPNLYKMQRMLLEKCDLQNYGD

SEQ ID NO: 15715 - protein, 25 aa, synthetic construct
  REGION 1..25: note = Description of Artificial Sequence: Synthetic peptide
TTTYKLNVGDYFVLTSHTVMPLSAP

SEQ ID NO: 15716 - protein, 25 aa, synthetic construct
  REGION 1..25: note = Description of Artificial Sequence: Synthetic peptide
YADVFHLYLQYIRKLHDELTGHMLD

SEQ ID NO: 15717 - protein, 25 aa, synthetic construct
  REGION 1..25: note = Description of Artificial Sequence: Synthetic peptide
DEDDNLIDSYFVVKRHTFSNYQHEE

SEQ ID NO: 15718 - protein, 25 aa, synthetic construct
  REGION 1..25: note = Description of Artificial Sequence: Synthetic peptide
VGVALLAVFQSASKIITLKKRWQLA

SEQ ID NO: 15719 - protein, 25 aa, synthetic construct
  REGION 1..25: note = Description of Artificial Sequence: Synthetic peptide
GVALLAVFQSASKIITLKKRWQLAL

SEQ ID NO: 15720 - protein, 25 aa, synthetic construct
  REGION 1..25: note = Description of Artificial Sequence: Synthetic peptide
YEDQDALFAYTKRNVIPTITQMNLK

SEQ ID NO: 15721 - protein, 25 aa, synthetic construct
  REGION 1..25: note = Description of Artificial Sequence: Synthetic peptide
VDDIVKTDGTLMIERFVSLAIDAYP

SEQ ID NO: 15722 - protein, 25 aa, synthetic construct
  REGION 1..25: note = Description of Artificial Sequence: Synthetic peptide
LVDLPIGINITRFQTLLALHRSYLT

SEQ ID NO: 15723 - protein, 25 aa, synthetic construct
  REGION 1..25: note = Description of Artificial Sequence: Synthetic peptide
KQIYKTPPIKDFGGFNFSQILPDPS

SEQ ID NO: 15724 - protein, 25 aa, synthetic construct
  REGION 1..25: note = Description of Artificial Sequence: Synthetic peptide
CPFGEVFNATRFASVYAWNRKRISN

SEQ ID NO: 15725 - protein, 25 aa, synthetic construct
  REGION 1..25: note = Description of Artificial Sequence: Synthetic peptide
WNTFTRLQSLENVAFNVVNKGHFDG

SEQ ID NO: 15726 - protein, 25 aa, synthetic construct
  REGION 1..25: note = Description of Artificial Sequence: Synthetic peptide
NTFTRLQSLENVAFNVVNKGHFDGQ

SEQ ID NO: 15727 - protein, 25 aa, synthetic construct
  REGION 1..25: note = Description of Artificial Sequence: Synthetic peptide
KSEDAQGMDNLACEDLKPVSEEVVE

SEQ ID NO: 15728 - protein, 25 aa, synthetic construct
  REGION 1..25: note = Description of Artificial Sequence: Synthetic peptide
NNCYLATALLTLQQIELKFNPPALQ

SEQ ID NO: 15729 - protein, 25 aa, synthetic construct
  REGION 1..25: note = Description of Artificial Sequence: Synthetic peptide
VVQLTSQWLTNIFGTVYEKLKPVLD

SEQ ID NO: 15730 - protein, 25 aa, synthetic construct
  REGION 1..25: note = Description of Artificial Sequence: Synthetic peptide
GGVVQLTSQWLTNIFGTVYEKLKPV

SEQ ID NO: 15731 - protein, 25 aa, synthetic construct
  REGION 1..25: note = Description of Artificial Sequence: Synthetic peptide
YSGVVTTVMFLARGIVFMCVEYCPI

SEQ ID NO: 15732 - protein, 25 aa, synthetic construct
  REGION 1..25: note = Description of Artificial Sequence: Synthetic peptide
ITEEVGHTDLMAAYVDNSSLTIKKP

SEQ ID NO: 15733 - protein, 25 aa, synthetic construct
  REGION 1..25: note = Description of Artificial Sequence: Synthetic peptide
KITEEVGHTDLMAAYVDNSSLTIKK

SEQ ID NO: 15734 - protein, 25 aa, synthetic construct
  REGION 1..25: note = Description of Artificial Sequence: Synthetic peptide
GTLSYEQFKKGVQIPCTCGKQATKY

SEQ ID NO: 15735 - protein, 25 aa, synthetic construct
  REGION 1..25: note = Description of Artificial Sequence: Synthetic peptide
GGDAALALLLLDRLNQLESKMSGKG

SEQ ID NO: 15736 - protein, 25 aa, synthetic construct
  REGION 1..25: note = Description of Artificial Sequence: Synthetic peptide
LAAIMQLFFSYFAVHFISNSWLMWL

SEQ ID NO: 15737 - protein, 25 aa, synthetic construct
  REGION 1..25: note = Description of Artificial Sequence: Synthetic peptide
AIMQLFFSYFAVHFISNSWLMWLII

SEQ ID NO: 15738 - protein, 25 aa, synthetic construct
  REGION 1..25: note = Description of Artificial Sequence: Synthetic peptide
GLAAIMQLFFSYFAVHFISNSWLMW

SEQ ID NO: 15739 - protein, 25 aa, synthetic construct
  REGION 1..25: note = Description of Artificial Sequence: Synthetic peptide
AAIMQLFFSYFAVHFISNSWLMWLI

SEQ ID NO: 15740 - protein, 25 aa, synthetic construct
  REGION 1..25: note = Description of Artificial Sequence: Synthetic peptide
ACVEEVTTTLEETKFLTENLLLYID

SEQ ID NO: 15741 - protein, 25 aa, synthetic construct
  REGION 1..25: note = Description of Artificial Sequence: Synthetic peptide
CVEEVTTTLEETKFLTENLLLYIDI

SEQ ID NO: 15742 - protein, 25 aa, synthetic construct
  REGION 1..25: note = Description of Artificial Sequence: Synthetic peptide
LLSDLQDLKWARFPKSDGTGTIYTE

SEQ ID NO: 15743 - protein, 25 aa, synthetic construct
  REGION 1..25: note = Description of Artificial Sequence: Synthetic peptide
ALLSDLQDLKWARFPKSDGTGTIYT

SEQ ID NO: 15744 - protein, 25 aa, synthetic construct
  REGION 1..25: note = Description of Artificial Sequence: Synthetic peptide
LALLSDLQDLKWARFPKSDGTGTIY

SEQ ID NO: 15745 - protein, 25 aa, synthetic construct
  REGION 1..25: note = Description of Artificial Sequence: Synthetic peptide
IKACVEEVTTTLEETKFLTENLLLY

SEQ ID NO: 15746 - protein, 25 aa, synthetic construct
  REGION 1..25: note = Description of Artificial Sequence: Synthetic peptide
KACVEEVTTTLEETKFLTENLLLYI

SEQ ID NO: 15747 - protein, 25 aa, synthetic construct
  REGION 1..25: note = Description of Artificial Sequence: Synthetic peptide
GDYILANTCTERLKLFAAETLKATE

SEQ ID NO: 15748 - protein, 25 aa, synthetic construct
  REGION 1..25: note = Description of Artificial Sequence: Synthetic peptide
APHGVVFLHVTYVPAQEKNFTTAPA

SEQ ID NO: 15749 - protein, 25 aa, synthetic construct
  REGION 1..25: note = Description of Artificial Sequence: Synthetic peptide
QSAPHGVVFLHVTYVPAQEKNFTTA

SEQ ID NO: 15750 - protein, 25 aa, synthetic construct
  REGION 1..25: note = Description of Artificial Sequence: Synthetic peptide
SAPHGVVFLHVTYVPAQEKNFTTAP

SEQ ID NO: 15751 - protein, 25 aa, synthetic construct
  REGION 1..25: note = Description of Artificial Sequence: Synthetic peptide
FPQSAPHGVVFLHVTYVPAQEKNFT

SEQ ID NO: 15752 - protein, 25 aa, synthetic construct
  REGION 1..25: note = Description of Artificial Sequence: Synthetic peptide
PQSAPHGVVFLHVTYVPAQEKNFTT

SEQ ID NO: 15753 - protein, 25 aa, synthetic construct
  REGION 1..25: note = Description of Artificial Sequence: Synthetic peptide
TGYKKPASRELKVTFFPDLNGDVVA

SEQ ID NO: 15754 - protein, 25 aa, synthetic construct
  REGION 1..25: note = Description of Artificial Sequence: Synthetic peptide
GYKKPASRELKVTFFPDLNGDVVAI

SEQ ID NO: 15755 - protein, 25 aa, synthetic construct
  REGION 1..25: note = Description of Artificial Sequence: Synthetic peptide
IVTALRANSAVKLQNNELSPVALRQ

SEQ ID NO: 15756 - protein, 25 aa, synthetic construct
  REGION 1..25: note = Description of Artificial Sequence: Synthetic peptide
LIVTALRANSAVKLQNNELSPVALR

SEQ ID NO: 15757 - protein, 25 aa, synthetic construct
  REGION 1..25: note = Description of Artificial Sequence: Synthetic peptide
PRVFSAVGNICYTPSKLIEYTDFAT

SEQ ID NO: 15758 - protein, 25 aa, synthetic construct
  REGION 1..25: note = Description of Artificial Sequence: Synthetic peptide
GDYFVLTSHTVMPLSAPTLVPQEHY

SEQ ID NO: 15759 - protein, 25 aa, synthetic construct
  REGION 1..25: note = Description of Artificial Sequence: Synthetic peptide
IPRRNVATLQAENVTGLFKDCSKVI

SEQ ID NO: 15760 - protein, 25 aa, synthetic construct
  REGION 1..25: note = Description of Artificial Sequence: Synthetic peptide
GKTFYVLPNDDTLRVEAFEYYHTTD

SEQ ID NO: 15761 - protein, 25 aa, synthetic construct
  REGION 1..25: note = Description of Artificial Sequence: Synthetic peptide
YCFLGYFCTCYFGLFCLLNRYFRLT

SEQ ID NO: 15762 - protein, 25 aa, synthetic construct
  REGION 1..25: note = Description of Artificial Sequence: Synthetic peptide
CFLGYFCTCYFGLFCLLNRYFRLTL

SEQ ID NO: 15763 - protein, 25 aa, synthetic construct
  REGION 1..25: note = Description of Artificial Sequence: Synthetic peptide
RRCPAEIVDTVSALVYDNKLKAHKD

SEQ ID NO: 15764 - protein, 25 aa, synthetic construct
  REGION 1..25: note = Description of Artificial Sequence: Synthetic peptide
WTNAGDYILANTCTERLKLFAAETL

SEQ ID NO: 15765 - protein, 25 aa, synthetic construct
  REGION 1..25: note = Description of Artificial Sequence: Synthetic peptide
TCDWTNAGDYILANTCTERLKLFAA

SEQ ID NO: 15766 - protein, 25 aa, synthetic construct
  REGION 1..25: note = Description of Artificial Sequence: Synthetic peptide
DWTNAGDYILANTCTERLKLFAAET

SEQ ID NO: 15767 - protein, 25 aa, synthetic construct
  REGION 1..25: note = Description of Artificial Sequence: Synthetic peptide
CDWTNAGDYILANTCTERLKLFAAE

SEQ ID NO: 15768 - protein, 25 aa, synthetic construct
  REGION 1..25: note = Description of Artificial Sequence: Synthetic peptide
VEKGIYQTSNFRVQPTESIVRFPNI

SEQ ID NO: 15769 - protein, 25 aa, synthetic construct
  REGION 1..25: note = Description of Artificial Sequence: Synthetic peptide
FYLTNDVSFLAHIQWMVMFTPLVPF

SEQ ID NO: 15770 - protein, 25 aa, synthetic construct
  REGION 1..25: note = Description of Artificial Sequence: Synthetic peptide
LTNDVSFLAHIQWMVMFTPLVPFWI

SEQ ID NO: 15771 - protein, 25 aa, synthetic construct
  REGION 1..25: note = Description of Artificial Sequence: Synthetic peptide
TNDVSFLAHIQWMVMFTPLVPFWIT

SEQ ID NO: 15772 - protein, 25 aa, synthetic construct
  REGION 1..25: note = Description of Artificial Sequence: Synthetic peptide
YLTNDVSFLAHIQWMVMFTPLVPFW

SEQ ID NO: 15773 - protein, 25 aa, synthetic construct
  REGION 1..25: note = Description of Artificial Sequence: Synthetic peptide
TGYRVTKNSKVQIGEYTFEKGDYGD

SEQ ID NO: 15774 - protein, 25 aa, synthetic construct
  REGION 1..25: note = Description of Artificial Sequence: Synthetic peptide
AEIVDTVSALVYDNKLKAHKDKSAQ

SEQ ID NO: 15775 - protein, 25 aa, synthetic construct
  REGION 1..25: note = Description of Artificial Sequence: Synthetic peptide
IVDTVSALVYDNKLKAHKDKSAQCF

SEQ ID NO: 15776 - protein, 25 aa, synthetic construct
  REGION 1..25: note = Description of Artificial Sequence: Synthetic peptide
EIVDTVSALVYDNKLKAHKDKSAQC

SEQ ID NO: 15777 - protein, 25 aa, synthetic construct
  REGION 1..25: note = Description of Artificial Sequence: Synthetic peptide
DKLQFTSLEIPRRNVATLQAENVTG

SEQ ID NO: 15778 - protein, 25 aa, synthetic construct
  REGION 1..25: note = Description of Artificial Sequence: Synthetic peptide
LQFTSLEIPRRNVATLQAENVTGLF

SEQ ID NO: 15779 - protein, 25 aa, synthetic construct
  REGION 1..25: note = Description of Artificial Sequence: Synthetic peptide
YFAVHFISNSWLMWLIINLVQMAPI

SEQ ID NO: 15780 - protein, 25 aa, synthetic construct
  REGION 1..25: note = Description of Artificial Sequence: Synthetic peptide
SYFAVHFISNSWLMWLIINLVQMAP

SEQ ID NO: 15781 - protein, 25 aa, synthetic construct
  REGION 1..25: note = Description of Artificial Sequence: Synthetic peptide
EIDRLNEVAKNLNESLIDLQELGKY

SEQ ID NO: 15782 - protein, 25 aa, synthetic construct
  REGION 1..25: note = Description of Artificial Sequence: Synthetic peptide
YLTFYLTNDVSFLAHIQWMVMFTPL

SEQ ID NO: 15783 - protein, 25 aa, synthetic construct
  REGION 1..25: note = Description of Artificial Sequence: Synthetic peptide
YLYLTFYLTNDVSFLAHIQWMVMFT

SEQ ID NO: 15784 - protein, 25 aa, synthetic construct
  REGION 1..25: note = Description of Artificial Sequence: Synthetic peptide
LTFYLTNDVSFLAHIQWMVMFTPLV

SEQ ID NO: 15785 - protein, 25 aa, synthetic construct
  REGION 1..25: note = Description of Artificial Sequence: Synthetic peptide
IYLYLTFYLTNDVSFLAHIQWMVMF

SEQ ID NO: 15786 - protein, 25 aa, synthetic construct
  REGION 1..25: note = Description of Artificial Sequence: Synthetic peptide
VIYLYLTFYLTNDVSFLAHIQWMVM

SEQ ID NO: 15787 - protein, 25 aa, synthetic construct
  REGION 1..25: note = Description of Artificial Sequence: Synthetic peptide
LYLTFYLTNDVSFLAHIQWMVMFTP

SEQ ID NO: 15788 - protein, 25 aa, synthetic construct
  REGION 1..25: note = Description of Artificial Sequence: Synthetic peptide
GRFVLALLSDLQDLKWARFPKSDGT

SEQ ID NO: 15789 - protein, 25 aa, synthetic construct
  REGION 1..25: note = Description of Artificial Sequence: Synthetic peptide
SSTCMMCYKRNRATRVECTTIVNGV

SEQ ID NO: 15790 - protein, 25 aa, synthetic construct
  REGION 1..25: note = Description of Artificial Sequence: Synthetic peptide
NSSTCMMCYKRNRATRVECTTIVNG

SEQ ID NO: 15791 - protein, 25 aa, synthetic construct
  REGION 1..25: note = Description of Artificial Sequence: Synthetic peptide
NVSLVKPSFYVYSRVKNLNSSRVPD

SEQ ID NO: 15792 - protein, 25 aa, synthetic construct
  REGION 1..25: note = Description of Artificial Sequence: Synthetic peptide
VSLVKPSFYVYSRVKNLNSSRVPDL

SEQ ID NO: 15793 - protein, 25 aa, synthetic construct
  REGION 1..25: note = Description of Artificial Sequence: Synthetic peptide
CMMCYKRNRATRVECTTIVNGVRRS

SEQ ID NO: 15794 - protein, 25 aa, synthetic construct
  REGION 1..25: note = Description of Artificial Sequence: Synthetic peptide
STCMMCYKRNRATRVECTTIVNGVR

SEQ ID NO: 15795 - protein, 25 aa, synthetic construct
  REGION 1..25: note = Description of Artificial Sequence: Synthetic peptide
MMCYKRNRATRVECTTIVNGVRRSF

SEQ ID NO: 15796 - protein, 25 aa, synthetic construct
  REGION 1..25: note = Description of Artificial Sequence: Synthetic peptide
MCYKRNRATRVECTTIVNGVRRSFY

SEQ ID NO: 15797 - protein, 25 aa, synthetic construct
  REGION 1..25: note = Description of Artificial Sequence: Synthetic peptide
TCMMCYKRNRATRVECTTIVNGVRR

SEQ ID NO: 15798 - protein, 25 aa, synthetic construct
  REGION 1..25: note = Description of Artificial Sequence: Synthetic peptide
EVPANSTVLSFCAFAVDAAKAYKDY

SEQ ID NO: 15799 - protein, 25 aa, synthetic construct
  REGION 1..25: note = Description of Artificial Sequence: Synthetic peptide
ADYNYKLPDDFTGCVIAWNSNNLDS

SEQ ID NO: 15800 - protein, 25 aa, synthetic construct
  REGION 1..25: note = Description of Artificial Sequence: Synthetic peptide
RMAGNGGDAALALLLLDRLNQLESK

SEQ ID NO: 15801 - protein, 25 aa, synthetic construct
  REGION 1..25: note = Description of Artificial Sequence: Synthetic peptide
TIQRKYKGIKIQEGVVDYGARFYFY

SEQ ID NO: 15802 - protein, 25 aa, synthetic construct
  REGION 1..25: note = Description of Artificial Sequence: Synthetic peptide
STIQRKYKGIKIQEGVVDYGARFYF

SEQ ID NO: 15803 - protein, 25 aa, synthetic construct
  REGION 1..25: note = Description of Artificial Sequence: Synthetic peptide
VVDGCNSSTCMMCYKRNRATRVECT

SEQ ID NO: 15804 - protein, 25 aa, synthetic construct
  REGION 1..25: note = Description of Artificial Sequence: Synthetic peptide
HVVDGCNSSTCMMCYKRNRATRVEC

SEQ ID NO: 15805 - protein, 25 aa, synthetic construct
  REGION 1..25: note = Description of Artificial Sequence: Synthetic peptide
TSKETLYCIDGALLTKSSEYKGPIT

SEQ ID NO: 15806 - protein, 25 aa, synthetic construct
  REGION 1..25: note = Description of Artificial Sequence: Synthetic peptide
VPAQEKNFTTAPAICHDGKAHFPRE

SEQ ID NO: 15807 - protein, 25 aa, synthetic construct
  REGION 1..25: note = Description of Artificial Sequence: Synthetic peptide
YVPAQEKNFTTAPAICHDGKAHFPR

SEQ ID NO: 15808 - protein, 25 aa, synthetic construct
  REGION 1..25: note = Description of Artificial Sequence: Synthetic peptide
GCNSSTCMMCYKRNRATRVECTTIV

SEQ ID NO: 15809 - protein, 25 aa, synthetic construct
  REGION 1..25: note = Description of Artificial Sequence: Synthetic peptide
LLPSLATVAYFNMVYMPASWVMRIM

SEQ ID NO: 15810 - protein, 25 aa, synthetic construct
  REGION 1..25: note = Description of Artificial Sequence: Synthetic peptide
LFLLPSLATVAYFNMVYMPASWVMR

SEQ ID NO: 15811 - protein, 25 aa, synthetic construct
  REGION 1..25: note = Description of Artificial Sequence: Synthetic peptide
FLLPSLATVAYFNMVYMPASWVMRI

SEQ ID NO: 15812 - protein, 25 aa, synthetic construct
  REGION 1..25: note = Description of Artificial Sequence: Synthetic peptide
YYKKDNSYFTEQPIDLVPNQPYPNA

SEQ ID NO: 15813 - protein, 25 aa, synthetic construct
  REGION 1..25: note = Description of Artificial Sequence: Synthetic peptide
NYYKKDNSYFTEQPIDLVPNQPYPN

SEQ ID NO: 15814 - protein, 25 aa, synthetic construct
  REGION 1..25: note = Description of Artificial Sequence: Synthetic peptide
KKDNSYFTEQPIDLVPNQPYPNASF

SEQ ID NO: 15815 - protein, 25 aa, synthetic construct
  REGION 1..25: note = Description of Artificial Sequence: Synthetic peptide
YKKDNSYFTEQPIDLVPNQPYPNAS

SEQ ID NO: 15816 - protein, 25 aa, synthetic construct
  REGION 1..25: note = Description of Artificial Sequence: Synthetic peptide
LANTCTERLKLFAAETLKATEETFK

SEQ ID NO: 15817 - protein, 25 aa, synthetic construct
  REGION 1..25: note = Description of Artificial Sequence: Synthetic peptide
ANTCTERLKLFAAETLKATEETFKL

SEQ ID NO: 15818 - protein, 25 aa, synthetic construct
  REGION 1..25: note = Description of Artificial Sequence: Synthetic peptide
NTCTERLKLFAAETLKATEETFKLS

SEQ ID NO: 15819 - protein, 25 aa, synthetic construct
  REGION 1..25: note = Description of Artificial Sequence: Synthetic peptide
CYLATALLTLQQIELKFNPPALQDA

SEQ ID NO: 15820 - protein, 25 aa, synthetic construct
  REGION 1..25: note = Description of Artificial Sequence: Synthetic peptide
ATALLTLQQIELKFNPPALQDAYYR

SEQ ID NO: 15821 - protein, 25 aa, synthetic construct
  REGION 1..25: note = Description of Artificial Sequence: Synthetic peptide
YLATALLTLQQIELKFNPPALQDAY

SEQ ID NO: 15822 - protein, 25 aa, synthetic construct
  REGION 1..25: note = Description of Artificial Sequence: Synthetic peptide
LATALLTLQQIELKFNPPALQDAYY

SEQ ID NO: 15823 - protein, 25 aa, synthetic construct
  REGION 1..25: note = Description of Artificial Sequence: Synthetic peptide
NCYLATALLTLQQIELKFNPPALQD

SEQ ID NO: 15824 - protein, 25 aa, synthetic construct
  REGION 1..25: note = Description of Artificial Sequence: Synthetic peptide
ALLTLQQIELKFNPPALQDAYYRAR

SEQ ID NO: 15825 - protein, 25 aa, synthetic construct
  REGION 1..25: note = Description of Artificial Sequence: Synthetic peptide
TALLTLQQIELKFNPPALQDAYYRA

SEQ ID NO: 15826 - protein, 25 aa, synthetic construct
  REGION 1..25: note = Description of Artificial Sequence: Synthetic peptide
SSYIVDSVTVKNGSIHLYFDKAGQK

SEQ ID NO: 15827 - protein, 25 aa, synthetic construct
  REGION 1..25: note = Description of Artificial Sequence: Synthetic peptide
HADQLTPTWRVYSTGSNVFQTRAGC

SEQ ID NO: 15828 - protein, 25 aa, synthetic construct
  REGION 1..25: note = Description of Artificial Sequence: Synthetic peptide
WNIGEQKSILSPLYAFASEAARVVR

SEQ ID NO: 15829 - protein, 25 aa, synthetic construct
  REGION 1..25: note = Description of Artificial Sequence: Synthetic peptide
DPNFKDQVILLNKHIDAYKTFPPTE

SEQ ID NO: 15830 - protein, 25 aa, synthetic construct
  REGION 1..25: note = Description of Artificial Sequence: Synthetic peptide
KDPNFKDQVILLNKHIDAYKTFPPT

SEQ ID NO: 15831 - protein, 25 aa, synthetic construct
  REGION 1..25: note = Description of Artificial Sequence: Synthetic peptide
QIRSAAKKNNLPFKLTCATTRQVVN

SEQ ID NO: 15832 - protein, 25 aa, synthetic construct
  REGION 1..25: note = Description of Artificial Sequence: Synthetic peptide
KDQVILLNKHIDAYKTFPPTEPKKD

SEQ ID NO: 15833 - protein, 25 aa, synthetic construct
  REGION 1..25: note = Description of Artificial Sequence: Synthetic peptide
NGVSFSTFEEAALCTFLLNKEMYLK

SEQ ID NO: 15834 - protein, 25 aa, synthetic construct
  REGION 1..25: note = Description of Artificial Sequence: Synthetic peptide
NQDLNGNWYDFGDFIQTTPGSGVPV

SEQ ID NO: 15835 - protein, 25 aa, synthetic construct
  REGION 1..25: note = Description of Artificial Sequence: Synthetic peptide
QDLNGNWYDFGDFIQTTPGSGVPVV

SEQ ID NO: 15836 - protein, 25 aa, synthetic construct
  REGION 1..25: note = Description of Artificial Sequence: Synthetic peptide
ANSTVLSFCAFAVDAAKAYKDYLAS

SEQ ID NO: 15837 - protein, 25 aa, synthetic construct
  REGION 1..25: note = Description of Artificial Sequence: Synthetic peptide
AQGMDNLACEDLKPVSEEVVENPTI

SEQ ID NO: 15838 - protein, 25 aa, synthetic construct
  REGION 1..25: note = Description of Artificial Sequence: Synthetic peptide
SDDYIATNGPLKVGGSCVLSGHNLA

SEQ ID NO: 15839 - protein, 25 aa, synthetic construct
  REGION 1..25: note = Description of Artificial Sequence: Synthetic peptide
DITFLKKDAPYIVGDVVQEGVLTAV

SEQ ID NO: 15840 - protein, 25 aa, synthetic construct
  REGION 1..25: note = Description of Artificial Sequence: Synthetic peptide
TSNFRVQPTESIVRFPNITNLCPFG

SEQ ID NO: 15841 - protein, 25 aa, synthetic construct
  REGION 1..25: note = Description of Artificial Sequence: Synthetic peptide
SVYYTSNPTTFHLDGEVITFDNLKT

SEQ ID NO: 15842 - protein, 25 aa, synthetic construct
  REGION 1..25: note = Description of Artificial Sequence: Synthetic peptide
REVRTIKVFTTVDNINLHTQVVDMS

SEQ ID NO: 15843 - protein, 25 aa, synthetic construct
  REGION 1..25: note = Description of Artificial Sequence: Synthetic peptide
YTVELGTEVNEFACVVADAVIKTLQ

SEQ ID NO: 15844 - protein, 25 aa, synthetic construct
  REGION 1..25: note = Description of Artificial Sequence: Synthetic peptide
DSVTVKNGSIHLYFDKAGQKTYERH

SEQ ID NO: 15845 - protein, 25 aa, synthetic construct
  REGION 1..25: note = Description of Artificial Sequence: Synthetic peptide
LDYIINLIIKNLSKSLTENKYSQLD

SEQ ID NO: 15846 - protein, 25 aa, synthetic construct
  REGION 1..25: note = Description of Artificial Sequence: Synthetic peptide
NLDYIINLIIKNLSKSLTENKYSQL

SEQ ID NO: 15847 - protein, 25 aa, synthetic construct
  REGION 1..25: note = Description of Artificial Sequence: Synthetic peptide
YAFASEAARVVRSIFSRTLETAQNS

SEQ ID NO: 15848 - protein, 25 aa, synthetic construct
  REGION 1..25: note = Description of Artificial Sequence: Synthetic peptide
GTEVNEFACVVADAVIKTLQPVSEL

SEQ ID NO: 15849 - protein, 25 aa, synthetic construct
  REGION 1..25: note = Description of Artificial Sequence: Synthetic peptide
LLLQLCTFTRSTNSRIKASMPTTIA

SEQ ID NO: 15850 - protein, 25 aa, synthetic construct
  REGION 1..25: note = Description of Artificial Sequence: Synthetic peptide
LTTAAKLMVVIPDYNTYKNTCDGTT

SEQ ID NO: 15851 - protein, 25 aa, synthetic construct
  REGION 1..25: note = Description of Artificial Sequence: Synthetic peptide
TTAAKLMVVIPDYNTYKNTCDGTTF

SEQ ID NO: 15852 - protein, 25 aa, synthetic construct
  REGION 1..25: note = Description of Artificial Sequence: Synthetic peptide
RDGCVPLNIIPLTTAAKLMVVIPDY

SEQ ID NO: 15853 - protein, 25 aa, synthetic construct
  REGION 1..25: note = Description of Artificial Sequence: Synthetic peptide
DGCVPLNIIPLTTAAKLMVVIPDYN

SEQ ID NO: 15854 - protein, 25 aa, synthetic construct
  REGION 1..25: note = Description of Artificial Sequence: Synthetic peptide
PVPYCYDTNVLEGSVAYESLRPDTR

SEQ ID NO: 15855 - protein, 25 aa, synthetic construct
  REGION 1..25: note = Description of Artificial Sequence: Synthetic peptide
KPVPYCYDTNVLEGSVAYESLRPDT

SEQ ID NO: 15856 - protein, 25 aa, synthetic construct
  REGION 1..25: note = Description of Artificial Sequence: Synthetic peptide
NNDYYRSLPGVFCGVDAVNLLTNMF

SEQ ID NO: 15857 - protein, 25 aa, synthetic construct
  REGION 1..25: note = Description of Artificial Sequence: Synthetic peptide
YRSLPGVFCGVDAVNLLTNMFTPLI

SEQ ID NO: 15858 - protein, 25 aa, synthetic construct
  REGION 1..25: note = Description of Artificial Sequence: Synthetic peptide
YYRSLPGVFCGVDAVNLLTNMFTPL

SEQ ID NO: 15859 - protein, 25 aa, synthetic construct
  REGION 1..25: note = Description of Artificial Sequence: Synthetic peptide
DYYRSLPGVFCGVDAVNLLTNMFTP

SEQ ID NO: 15860 - protein, 25 aa, synthetic construct
  REGION 1..25: note = Description of Artificial Sequence: Synthetic peptide
NDYYRSLPGVFCGVDAVNLLTNMFT

SEQ ID NO: 15861 - protein, 25 aa, synthetic construct
  REGION 1..25: note = Description of Artificial Sequence: Synthetic peptide
RSLPGVFCGVDAVNLLTNMFTPLIQ

SEQ ID NO: 15862 - protein, 25 aa, synthetic construct
  REGION 1..25: note = Description of Artificial Sequence: Synthetic peptide
PASRELKVTFFPDLNGDVVAIDYKH

SEQ ID NO: 15863 - protein, 25 aa, synthetic construct
  REGION 1..25: note = Description of Artificial Sequence: Synthetic peptide
PAQEKNFTTAPAICHDGKAHFPREG

SEQ ID NO: 15864 - protein, 25 aa, synthetic construct
  REGION 1..25: note = Description of Artificial Sequence: Synthetic peptide
PLNSIIKTIQPRVEKKKLDGFMGRI

SEQ ID NO: 15865 - protein, 25 aa, synthetic construct
  REGION 1..25: note = Description of Artificial Sequence: Synthetic peptide
FASEAARVVRSIFSRTLETAQNSVR

SEQ ID NO: 15866 - protein, 25 aa, synthetic construct
  REGION 1..25: note = Description of Artificial Sequence: Synthetic peptide
ASEAARVVRSIFSRTLETAQNSVRV

SEQ ID NO: 15867 - protein, 25 aa, synthetic construct
  REGION 1..25: note = Description of Artificial Sequence: Synthetic peptide
TSNYSGVVTTVMFLARGIVFMCVEY

SEQ ID NO: 15868 - protein, 25 aa, synthetic construct
  REGION 1..25: note = Description of Artificial Sequence: Synthetic peptide
AKAYKDYLASGGQPITNCVKMLCTH

SEQ ID NO: 15869 - protein, 25 aa, synthetic construct
  REGION 1..25: note = Description of Artificial Sequence: Synthetic peptide
KAYKDYLASGGQPITNCVKMLCTHT

SEQ ID NO: 15870 - protein, 25 aa, synthetic construct
  REGION 1..25: note = Description of Artificial Sequence: Synthetic peptide
VNEFACVVADAVIKTLQPVSELLTP

SEQ ID NO: 15871 - protein, 25 aa, synthetic construct
  REGION 1..25: note = Description of Artificial Sequence: Synthetic peptide
INITRFQTLLALHRSYLTPGDSSSG

SEQ ID NO: 15872 - protein, 25 aa, synthetic construct
  REGION 1..25: note = Description of Artificial Sequence: Synthetic peptide
PYCYDTNVLEGSVAYESLRPDTRYV

SEQ ID NO: 15873 - protein, 25 aa, synthetic construct
  REGION 1..25: note = Description of Artificial Sequence: Synthetic peptide
NLACEDLKPVSEEVVENPTIQKDVL

SEQ ID NO: 15874 - protein, 25 aa, synthetic construct
  REGION 1..25: note = Description of Artificial Sequence: Synthetic peptide
EDLKPVSEEVVENPTIQKDVLECNV

SEQ ID NO: 15875 - protein, 25 aa, synthetic construct
  REGION 1..25: note = Description of Artificial Sequence: Synthetic peptide
LACEDLKPVSEEVVENPTIQKDVLE

SEQ ID NO: 15876 - protein, 25 aa, synthetic construct
  REGION 1..25: note = Description of Artificial Sequence: Synthetic peptide
CEDLKPVSEEVVENPTIQKDVLECN

SEQ ID NO: 15877 - protein, 25 aa, synthetic construct
  REGION 1..25: note = Description of Artificial Sequence: Synthetic peptide
ACEDLKPVSEEVVENPTIQKDVLEC

SEQ ID NO: 15878 - protein, 25 aa, synthetic construct
  REGION 1..25: note = Description of Artificial Sequence: Synthetic peptide
KQIVESCGNFKVTKGKAKKGAWNIG

SEQ ID NO: 15879 - protein, 25 aa, synthetic construct
  REGION 1..25: note = Description of Artificial Sequence: Synthetic peptide
AFKQIVESCGNFKVTKGKAKKGAWN

SEQ ID NO: 15880 - protein, 25 aa, synthetic construct
  REGION 1..25: note = Description of Artificial Sequence: Synthetic peptide
FKQIVESCGNFKVTKGKAKKGAWNI

SEQ ID NO: 15881 - protein, 25 aa, synthetic construct
  REGION 1..25: note = Description of Artificial Sequence: Synthetic peptide
GVLMSNLGMPSYCTGYREGYLNSTN

SEQ ID NO: 15882 - protein, 25 aa, synthetic construct
  REGION 1..25: note = Description of Artificial Sequence: Synthetic peptide
ASGKPVPYCYDTNVLEGSVAYESLR

SEQ ID NO: 15883 - protein, 25 aa, synthetic construct
  REGION 1..25: note = Description of Artificial Sequence: Synthetic peptide
EAELAKNVSLDNVLSTFISAARQGF

SEQ ID NO: 15884 - protein, 25 aa, synthetic construct
  REGION 1..25: note = Description of Artificial Sequence: Synthetic peptide
AEAELAKNVSLDNVLSTFISAARQG

SEQ ID NO: 15885 - protein, 25 aa, synthetic construct
  REGION 1..25: note = Description of Artificial Sequence: Synthetic peptide
AELAKNVSLDNVLSTFISAARQGFV

SEQ ID NO: 15886 - protein, 25 aa, synthetic construct
  REGION 1..25: note = Description of Artificial Sequence: Synthetic peptide
YPNMFITREEAIRHVRAWIGFDVEG

SEQ ID NO: 15887 - protein, 25 aa, synthetic construct
  REGION 1..25: note = Description of Artificial Sequence: Synthetic peptide
QGLVASIKNFKSVLYYQNNVFMSEA

SEQ ID NO: 15888 - protein, 25 aa, synthetic construct
  REGION 1..25: note = Description of Artificial Sequence: Synthetic peptide
VNTFSSTFNVPMEKLKTLVATAEAE

SEQ ID NO: 15889 - protein, 25 aa, synthetic construct
  REGION 1..25: note = Description of Artificial Sequence: Synthetic peptide
LPFFSNVTWFHAIHVSGTNGTKRFD

SEQ ID NO: 15890 - protein, 25 aa, synthetic construct
  REGION 1..25: note = Description of Artificial Sequence: Synthetic peptide
FLPFFSNVTWFHAIHVSGTNGTKRF

SEQ ID NO: 15891 - protein, 25 aa, synthetic construct
  REGION 1..25: note = Description of Artificial Sequence: Synthetic peptide
LFLPFFSNVTWFHAIHVSGTNGTKR

SEQ ID NO: 15892 - protein, 25 aa, synthetic construct
  REGION 1..25: note = Description of Artificial Sequence: Synthetic peptide
FSSTFNVPMEKLKTLVATAEAELAK

SEQ ID NO: 15893 - protein, 25 aa, synthetic construct
  REGION 1..25: note = Description of Artificial Sequence: Synthetic peptide
FTPFDVVRQCSGVTFQSAVKRTIKG

SEQ ID NO: 15894 - protein, 25 aa, synthetic construct
  REGION 1..25: note = Description of Artificial Sequence: Synthetic peptide
EFTPFDVVRQCSGVTFQSAVKRTIK

SEQ ID NO: 15895 - protein, 25 aa, synthetic construct
  REGION 1..25: note = Description of Artificial Sequence: Synthetic peptide
QKEKVNINIVGDFKLNEEIAIILAS

SEQ ID NO: 15896 - protein, 25 aa, synthetic construct
  REGION 1..25: note = Description of Artificial Sequence: Synthetic peptide
ISASIVAGGIVAIVVTCLAYYFMRF

SEQ ID NO: 15897 - protein, 25 aa, synthetic construct
  REGION 1..25: note = Description of Artificial Sequence: Synthetic peptide
APYIVGDVVQEGVLTAVVIPTKKAG

SEQ ID NO: 15898 - protein, 25 aa, synthetic construct
  REGION 1..25: note = Description of Artificial Sequence: Synthetic peptide
KDAPYIVGDVVQEGVLTAVVIPTKK

SEQ ID NO: 15899 - protein, 25 aa, synthetic construct
  REGION 1..25: note = Description of Artificial Sequence: Synthetic peptide
DAPYIVGDVVQEGVLTAVVIPTKKA

SEQ ID NO: 15900 - protein, 25 aa, synthetic construct
  REGION 1..25: note = Description of Artificial Sequence: Synthetic peptide
VEAFEYYHTTDPSFLGRYMSALNHT

SEQ ID NO: 15901 - protein, 25 aa, synthetic construct
  REGION 1..25: note = Description of Artificial Sequence: Synthetic peptide
SVAYESLRPDTRYVLMDGSIIQFPN

SEQ ID NO: 15902 - protein, 25 aa, synthetic construct
  REGION 1..25: note = Description of Artificial Sequence: Synthetic peptide
GMDNLACEDLKPVSEEVVENPTIQK

SEQ ID NO: 15903 - protein, 25 aa, synthetic construct
  REGION 1..25: note = Description of Artificial Sequence: Synthetic peptide
AAMQRKLEKMADQAMTQMYKQARSE

SEQ ID NO: 15904 - protein, 25 aa, synthetic construct
  REGION 1..25: note = Description of Artificial Sequence: Synthetic peptide
CTFTRSTNSRIKASMPTTIAKNTVK

SEQ ID NO: 15905 - protein, 25 aa, synthetic construct
  REGION 1..25: note = Description of Artificial Sequence: Synthetic peptide
LCTFTRSTNSRIKASMPTTIAKNTV

SEQ ID NO: 15906 - protein, 25 aa, synthetic construct
  REGION 1..25: note = Description of Artificial Sequence: Synthetic peptide
VLYQPPQTSITSAVLQSGFRKMAFP

SEQ ID NO: 15907 - protein, 25 aa, synthetic construct
  REGION 1..25: note = Description of Artificial Sequence: Synthetic peptide
LYQPPQTSITSAVLQSGFRKMAFPS

SEQ ID NO: 15908 - protein, 25 aa, synthetic construct
  REGION 1..25: note = Description of Artificial Sequence: Synthetic peptide
DVLYQPPQTSITSAVLQSGFRKMAF

SEQ ID NO: 15909 - protein, 25 aa, synthetic construct
  REGION 1..25: note = Description of Artificial Sequence: Synthetic peptide
YQPPQTSITSAVLQSGFRKMAFPSG

SEQ ID NO: 15910 - protein, 25 aa, synthetic construct
  REGION 1..25: note = Description of Artificial Sequence: Synthetic peptide
QPPQTSITSAVLQSGFRKMAFPSGK

SEQ ID NO: 15911 - protein, 25 aa, synthetic construct
  REGION 1..25: note = Description of Artificial Sequence: Synthetic peptide
SDVLYQPPQTSITSAVLQSGFRKMA

SEQ ID NO: 15912 - protein, 25 aa, synthetic construct
  REGION 1..25: note = Description of Artificial Sequence: Synthetic peptide
ATYYLFDESGEFKLASHMYCSFYPP

SEQ ID NO: 15913 - protein, 25 aa, synthetic construct
  REGION 1..25: note = Description of Artificial Sequence: Synthetic peptide
DKKIKACVEEVTTTLEETKFLTENL

SEQ ID NO: 15914 - protein, 25 aa, synthetic construct
  REGION 1..25: note = Description of Artificial Sequence: Synthetic peptide
KKIKACVEEVTTTLEETKFLTENLL

SEQ ID NO: 15915 - protein, 25 aa, synthetic construct
  REGION 1..25: note = Description of Artificial Sequence: Synthetic peptide
LNRVCTNYMPYFFTLLLQLCTFTRS

SEQ ID NO: 15916 - protein, 25 aa, synthetic construct
  REGION 1..25: note = Description of Artificial Sequence: Synthetic peptide
CLNRVCTNYMPYFFTLLLQLCTFTR

SEQ ID NO: 15917 - protein, 25 aa, synthetic construct
  REGION 1..25: note = Description of Artificial Sequence: Synthetic peptide
RCLNRVCTNYMPYFFTLLLQLCTFT

SEQ ID NO: 15918 - protein, 25 aa, synthetic construct
  REGION 1..25: note = Description of Artificial Sequence: Synthetic peptide
RLTLGVYDYLVSTQEFRYMNSQGLL

SEQ ID NO: 15919 - protein, 25 aa, synthetic construct
  REGION 1..25: note = Description of Artificial Sequence: Synthetic peptide
FRLTLGVYDYLVSTQEFRYMNSQGL

SEQ ID NO: 15920 - protein, 25 aa, synthetic construct
  REGION 1..25: note = Description of Artificial Sequence: Synthetic peptide
YFRLTLGVYDYLVSTQEFRYMNSQG

SEQ ID NO: 15921 - protein, 25 aa, synthetic construct
  REGION 1..25: note = Description of Artificial Sequence: Synthetic peptide
SSGVTRELMRELNGGAYTRYVDNNF

SEQ ID NO: 15922 - protein, 25 aa, synthetic construct
  REGION 1..25: note = Description of Artificial Sequence: Synthetic peptide
HSSGVTRELMRELNGGAYTRYVDNN

SEQ ID NO: 15923 - protein, 25 aa, synthetic construct
  REGION 1..25: note = Description of Artificial Sequence: Synthetic peptide
SGVTRELMRELNGGAYTRYVDNNFC

SEQ ID NO: 15924 - protein, 25 aa, synthetic construct
  REGION 1..25: note = Description of Artificial Sequence: Synthetic peptide
FLNKVVSTTTNIVTRCLNRVCTNYM

SEQ ID NO: 15925 - protein, 25 aa, synthetic construct
  REGION 1..25: note = Description of Artificial Sequence: Synthetic peptide
LNKVVSTTTNIVTRCLNRVCTNYMP

SEQ ID NO: 15926 - protein, 25 aa, synthetic construct
  REGION 1..25: note = Description of Artificial Sequence: Synthetic peptide
VVRQCSGVTFQSAVKRTIKGTHHWL

SEQ ID NO: 15927 - protein, 25 aa, synthetic construct
  REGION 1..25: note = Description of Artificial Sequence: Synthetic peptide
PSARIVYTACSHAAVDALCEKALKY

SEQ ID NO: 15928 - protein, 25 aa, synthetic construct
  REGION 1..25: note = Description of Artificial Sequence: Synthetic peptide
ESDDYIATNGPLKVGGSCVLSGHNL

SEQ ID NO: 15929 - protein, 25 aa, synthetic construct
  REGION 1..25: note = Description of Artificial Sequence: Synthetic peptide
TTLEETKFLTENLLLYIDINGNLHP

SEQ ID NO: 15930 - protein, 25 aa, synthetic construct
  REGION 1..25: note = Description of Artificial Sequence: Synthetic peptide
TTTLEETKFLTENLLLYIDINGNLH

SEQ ID NO: 15931 - protein, 25 aa, synthetic construct
  REGION 1..25: note = Description of Artificial Sequence: Synthetic peptide
ALKGGKIVNNWLKQLIKVTLVFLFV

SEQ ID NO: 15932 - protein, 25 aa, synthetic construct
  REGION 1..25: note = Description of Artificial Sequence: Synthetic peptide
SNSFDVLKSEDAQGMDNLACEDLKP

SEQ ID NO: 15933 - protein, 25 aa, synthetic construct
  REGION 1..25: note = Description of Artificial Sequence: Synthetic peptide
NSFDVLKSEDAQGMDNLACEDLKPV

SEQ ID NO: 15934 - protein, 25 aa, synthetic construct
  REGION 1..25: note = Description of Artificial Sequence: Synthetic peptide
VVTTKIALKGGKIVNNWLKQLIKVT

SEQ ID NO: 15935 - protein, 25 aa, synthetic construct
  REGION 1..25: note = Description of Artificial Sequence: Synthetic peptide
VTTKIALKGGKIVNNWLKQLIKVTL

SEQ ID NO: 15936 - protein, 25 aa, synthetic construct
  REGION 1..25: note = Description of Artificial Sequence: Synthetic peptide
SMDNSPNLAWPLIVTALRANSAVKL

SEQ ID NO: 15937 - protein, 25 aa, synthetic construct
  REGION 1..25: note = Description of Artificial Sequence: Synthetic peptide
ISMDNSPNLAWPLIVTALRANSAVK

SEQ ID NO: 15938 - protein, 25 aa, synthetic construct
  REGION 1..25: note = Description of Artificial Sequence: Synthetic peptide
LMTARTVYDDGARRVWTLMNVLTLV

SEQ ID NO: 15939 - protein, 25 aa, synthetic construct
  REGION 1..25: note = Description of Artificial Sequence: Synthetic peptide
SFYVYANGGKGFCKLHNWNCVNCDT

SEQ ID NO: 15940 - protein, 25 aa, synthetic construct
  REGION 1..25: note = Description of Artificial Sequence: Synthetic peptide
SEAARVVRSIFSRTLETAQNSVRVL

SEQ ID NO: 15941 - protein, 25 aa, synthetic construct
  REGION 1..25: note = Description of Artificial Sequence: Synthetic peptide
SSPDAVTAYNGYLTSSSKTPEEHFI

SEQ ID NO: 15942 - protein, 25 aa, synthetic construct
  REGION 1..25: note = Description of Artificial Sequence: Synthetic peptide
SPDAVTAYNGYLTSSSKTPEEHFIE

SEQ ID NO: 15943 - protein, 25 aa, synthetic construct
  REGION 1..25: note = Description of Artificial Sequence: Synthetic peptide
KLKDCVMYASAVVLLILMTARTVYD

SEQ ID NO: 15944 - protein, 25 aa, synthetic construct
  REGION 1..25: note = Description of Artificial Sequence: Synthetic peptide
LLILMTARTVYDDGARRVWTLMNVL

SEQ ID NO: 15945 - protein, 25 aa, synthetic construct
  REGION 1..25: note = Description of Artificial Sequence: Synthetic peptide
GIVAIVVTCLAYYFMRFRRAFGEYS

SEQ ID NO: 15946 - protein, 25 aa, synthetic construct
  REGION 1..25: note = Description of Artificial Sequence: Synthetic peptide
IVAIVVTCLAYYFMRFRRAFGEYSH

SEQ ID NO: 15947 - protein, 25 aa, synthetic construct
  REGION 1..25: note = Description of Artificial Sequence: Synthetic peptide
GGIVAIVVTCLAYYFMRFRRAFGEY

SEQ ID NO: 15948 - protein, 25 aa, synthetic construct
  REGION 1..25: note = Description of Artificial Sequence: Synthetic peptide
LKVDTANPKTPKYKFVRIQPGQTFS

SEQ ID NO: 15949 - protein, 25 aa, synthetic construct
  REGION 1..25: note = Description of Artificial Sequence: Synthetic peptide
KTTEVVGDIILKPANNSLKITEEVG

SEQ ID NO: 15950 - protein, 25 aa, synthetic construct
  REGION 1..25: note = Description of Artificial Sequence: Synthetic peptide
VKTTEVVGDIILKPANNSLKITEEV

SEQ ID NO: 15951 - protein, 25 aa, synthetic construct
  REGION 1..25: note = Description of Artificial Sequence: Synthetic peptide
KVTLVFLFVAAIFYLITPVHVMSKH

SEQ ID NO: 15952 - protein, 25 aa, synthetic construct
  REGION 1..25: note = Description of Artificial Sequence: Synthetic peptide
TNVLEGSVAYESLRPDTRYVLMDGS

SEQ ID NO: 15953 - protein, 25 aa, synthetic construct
  REGION 1..25: note = Description of Artificial Sequence: Synthetic peptide
LLSMQGAVDINKLCEEMLDNRATLQ

SEQ ID NO: 15954 - protein, 25 aa, synthetic construct
  REGION 1..25: note = Description of Artificial Sequence: Synthetic peptide
SVLLSMQGAVDINKLCEEMLDNRAT

SEQ ID NO: 15955 - protein, 25 aa, synthetic construct
  REGION 1..25: note = Description of Artificial Sequence: Synthetic peptide
LSVLLSMQGAVDINKLCEEMLDNRA

SEQ ID NO: 15956 - protein, 25 aa, synthetic construct
  REGION 1..25: note = Description of Artificial Sequence: Synthetic peptide
VLLSMQGAVDINKLCEEMLDNRATL

SEQ ID NO: 15957 - protein, 25 aa, synthetic construct
  REGION 1..25: note = Description of Artificial Sequence: Synthetic peptide
DCVMYASAVVLLILMTARTVYDDGA

SEQ ID NO: 15958 - protein, 25 aa, synthetic construct
  REGION 1..25: note = Description of Artificial Sequence: Synthetic peptide
KDCVMYASAVVLLILMTARTVYDDG

SEQ ID NO: 15959 - protein, 25 aa, synthetic construct
  REGION 1..25: note = Description of Artificial Sequence: Synthetic peptide
HNDILLAKDTTEAFEKMVSLLSVLL

SEQ ID NO: 15960 - protein, 25 aa, synthetic construct
  REGION 1..25: note = Description of Artificial Sequence: Synthetic peptide
NDILLAKDTTEAFEKMVSLLSVLLS

SEQ ID NO: 15961 - protein, 25 aa, synthetic construct
  REGION 1..25: note = Description of Artificial Sequence: Synthetic peptide
IDHPNPKGFCDLKGKYVQIPTTCAN

SEQ ID NO: 15962 - protein, 25 aa, synthetic construct
  REGION 1..25: note = Description of Artificial Sequence: Synthetic peptide
DHPNPKGFCDLKGKYVQIPTTCAND

SEQ ID NO: 15963 - protein, 25 aa, synthetic construct
  REGION 1..25: note = Description of Artificial Sequence: Synthetic peptide
HPNPKGFCDLKGKYVQIPTTCANDP

SEQ ID NO: 15964 - protein, 25 aa, synthetic construct
  REGION 1..25: note = Description of Artificial Sequence: Synthetic peptide
HIDHPNPKGFCDLKGKYVQIPTTCA

SEQ ID NO: 15965 - protein, 25 aa, synthetic construct
  REGION 1..25: note = Description of Artificial Sequence: Synthetic peptide
DIEVTGDSCNNYMLTYNKVENMTPR

SEQ ID NO: 15966 - protein, 25 aa, synthetic construct
  REGION 1..25: note = Description of Artificial Sequence: Synthetic peptide
VLSTFISAARQGFVDSDVETKDVVE

SEQ ID NO: 15967 - protein, 25 aa, synthetic construct
  REGION 1..25: note = Description of Artificial Sequence: Synthetic peptide
NVLSTFISAARQGFVDSDVETKDVV

SEQ ID NO: 15968 - protein, 25 aa, synthetic construct
  REGION 1..25: note = Description of Artificial Sequence: Synthetic peptide
AGGIVAIVVTCLAYYFMRFRRAFGE

SEQ ID NO: 15969 - protein, 25 aa, synthetic construct
  REGION 1..25: note = Description of Artificial Sequence: Synthetic peptide
KLTCATTRQVVNVVTTKIALKGGKI

SEQ ID NO: 15970 - protein, 25 aa, synthetic construct
  REGION 1..25: note = Description of Artificial Sequence: Synthetic peptide
TCATTRQVVNVVTTKIALKGGKIVN

SEQ ID NO: 15971 - protein, 25 aa, synthetic construct
  REGION 1..25: note = Description of Artificial Sequence: Synthetic peptide
ATTRQVVNVVTTKIALKGGKIVNNW

SEQ ID NO: 15972 - protein, 25 aa, synthetic construct
  REGION 1..25: note = Description of Artificial Sequence: Synthetic peptide
FKLTCATTRQVVNVVTTKIALKGGK

SEQ ID NO: 15973 - protein, 25 aa, synthetic construct
  REGION 1..25: note = Description of Artificial Sequence: Synthetic peptide
CATTRQVVNVVTTKIALKGGKIVNN

SEQ ID NO: 15974 - protein, 25 aa, synthetic construct
  REGION 1..25: note = Description of Artificial Sequence: Synthetic peptide
LTCATTRQVVNVVTTKIALKGGKIV

SEQ ID NO: 15975 - protein, 25 aa, synthetic construct
  REGION 1..25: note = Description of Artificial Sequence: Synthetic peptide
VEKKKLDGFMGRIRSVYPVASPNEC

SEQ ID NO: 15976 - protein, 25 aa, synthetic construct
  REGION 1..25: note = Description of Artificial Sequence: Synthetic peptide
EKKKLDGFMGRIRSVYPVASPNECN

SEQ ID NO: 15977 - protein, 25 aa, synthetic construct
  REGION 1..25: note = Description of Artificial Sequence: Synthetic peptide
KKLDGFMGRIRSVYPVASPNECNQM

SEQ ID NO: 15978 - protein, 25 aa, synthetic construct
  REGION 1..25: note = Description of Artificial Sequence: Synthetic peptide
KKKLDGFMGRIRSVYPVASPNECNQ

SEQ ID NO: 15979 - protein, 25 aa, synthetic construct
  REGION 1..25: note = Description of Artificial Sequence: Synthetic peptide
AQVAKSHNIALIWNVKDFMSLSEQL

SEQ ID NO: 15980 - protein, 25 aa, synthetic construct
  REGION 1..25: note = Description of Artificial Sequence: Synthetic peptide
NAQVAKSHNIALIWNVKDFMSLSEQ

SEQ ID NO: 15981 - protein, 25 aa, synthetic construct
  REGION 1..25: note = Description of Artificial Sequence: Synthetic peptide
EYYHTTDPSFLGRYMSALNHTKKWK

SEQ ID NO: 15982 - protein, 25 aa, synthetic construct
  REGION 1..25: note = Description of Artificial Sequence: Synthetic peptide
DAVIKTLQPVSELLTPLGIDLDEWS

SEQ ID NO: 15983 - protein, 25 aa, synthetic construct
  REGION 1..25: note = Description of Artificial Sequence: Synthetic peptide
ADAVIKTLQPVSELLTPLGIDLDEW

SEQ ID NO: 15984 - protein, 25 aa, synthetic construct
  REGION 1..25: note = Description of Artificial Sequence: Synthetic peptide
VADAVIKTLQPVSELLTPLGIDLDE

SEQ ID NO: 15985 - protein, 25 aa, synthetic construct
  REGION 1..25: note = Description of Artificial Sequence: Synthetic peptide
WEIQQVVDADSKIVQLSEISMDNSP

SEQ ID NO: 15986 - protein, 25 aa, synthetic construct
  REGION 1..25: note = Description of Artificial Sequence: Synthetic peptide
KFKEGVEFLRDGWEIVKFISTCACE

SEQ ID NO: 15987 - protein, 25 aa, synthetic construct
  REGION 1..25: note = Description of Artificial Sequence: Synthetic peptide
PSVEQRKQDDKKIKACVEEVTTTLE

SEQ ID NO: 15988 - protein, 25 aa, synthetic construct
  REGION 1..25: note = Description of Artificial Sequence: Synthetic peptide
HVMSKHTDFSSEIIGYKAIDGGVTR

SEQ ID NO: 15989 - protein, 25 aa, synthetic construct
  REGION 1..25: note = Description of Artificial Sequence: Synthetic peptide
MSKHTDFSSEIIGYKAIDGGVTRDI

SEQ ID NO: 15990 - protein, 25 aa, synthetic construct
  REGION 1..25: note = Description of Artificial Sequence: Synthetic peptide
DFSSEIIGYKAIDGGVTRDIASTDT

SEQ ID NO: 15991 - protein, 25 aa, synthetic construct
  REGION 1..25: note = Description of Artificial Sequence: Synthetic peptide
TDFSSEIIGYKAIDGGVTRDIASTD

SEQ ID NO: 15992 - protein, 25 aa, synthetic construct
  REGION 1..25: note = Description of Artificial Sequence: Synthetic peptide
SKHTDFSSEIIGYKAIDGGVTRDIA

SEQ ID NO: 15993 - protein, 25 aa, synthetic construct
  REGION 1..25: note = Description of Artificial Sequence: Synthetic peptide
VMSKHTDFSSEIIGYKAIDGGVTRD

SEQ ID NO: 15994 - protein, 25 aa, synthetic construct
  REGION 1..25: note = Description of Artificial Sequence: Synthetic peptide
FSSEIIGYKAIDGGVTRDIASTDTC

SEQ ID NO: 15995 - protein, 25 aa, synthetic construct
  REGION 1..25: note = Description of Artificial Sequence: Synthetic peptide
HTDFSSEIIGYKAIDGGVTRDIAST

SEQ ID NO: 15996 - protein, 25 aa, synthetic construct
  REGION 1..25: note = Description of Artificial Sequence: Synthetic peptide
KHTDFSSEIIGYKAIDGGVTRDIAS

SEQ ID NO: 15997 - protein, 25 aa, synthetic construct
  REGION 1..25: note = Description of Artificial Sequence: Synthetic peptide
GSVAYESLRPDTRYVLMDGSIIQFP

SEQ ID NO: 15998 - protein, 25 aa, synthetic construct
  REGION 1..25: note = Description of Artificial Sequence: Synthetic peptide
EGSVAYESLRPDTRYVLMDGSIIQF

SEQ ID NO: 15999 - protein, 25 aa, synthetic construct
  REGION 1..25: note = Description of Artificial Sequence: Synthetic peptide
CYFGLFCLLNRYFRLTLGVYDYLVS

SEQ ID NO: 16000 - protein, 25 aa, synthetic construct
  REGION 1..25: note = Description of Artificial Sequence: Synthetic peptide
FCTCYFGLFCLLNRYFRLTLGVYDY

SEQ ID NO: 16001 - protein, 25 aa, synthetic construct
  REGION 1..25: note = Description of Artificial Sequence: Synthetic peptide
YFGLFCLLNRYFRLTLGVYDYLVST

SEQ ID NO: 16002 - protein, 25 aa, synthetic construct
  REGION 1..25: note = Description of Artificial Sequence: Synthetic peptide
FGLFCLLNRYFRLTLGVYDYLVSTQ

SEQ ID NO: 16003 - protein, 25 aa, synthetic construct
  REGION 1..25: note = Description of Artificial Sequence: Synthetic peptide
TCYFGLFCLLNRYFRLTLGVYDYLV

SEQ ID NO: 16004 - protein, 25 aa, synthetic construct
  REGION 1..25: note = Description of Artificial Sequence: Synthetic peptide
CTCYFGLFCLLNRYFRLTLGVYDYL

SEQ ID NO: 16005 - protein, 25 aa, synthetic construct
  REGION 1..25: note = Description of Artificial Sequence: Synthetic peptide
ARRVWTLMNVLTLVYKVYYGNALDQ

SEQ ID NO: 16006 - protein, 25 aa, synthetic construct
  REGION 1..25: note = Description of Artificial Sequence: Synthetic peptide
SVIYLYLTFYLTNDVSFLAHIQWMV

SEQ ID NO: 16007 - protein, 25 aa, synthetic construct
  REGION 1..25: note = Description of Artificial Sequence: Synthetic peptide
YSVIYLYLTFYLTNDVSFLAHIQWM

SEQ ID NO: 16008 - protein, 25 aa, synthetic construct
  REGION 1..25: note = Description of Artificial Sequence: Synthetic peptide
KGSLPINVIVFDGKSKCEESSAKSA

SEQ ID NO: 16009 - protein, 25 aa, synthetic construct
  REGION 1..25: note = Description of Artificial Sequence: Synthetic peptide
GSLPINVIVFDGKSKCEESSAKSAS

SEQ ID NO: 16010 - protein, 25 aa, synthetic construct
  REGION 1..25: note = Description of Artificial Sequence: Synthetic peptide
NTKGSLPINVIVFDGKSKCEESSAK

SEQ ID NO: 16011 - protein, 25 aa, synthetic construct
  REGION 1..25: note = Description of Artificial Sequence: Synthetic peptide
TKGSLPINVIVFDGKSKCEESSAKS

SEQ ID NO: 16012 - protein, 25 aa, synthetic construct
  REGION 1..25: note = Description of Artificial Sequence: Synthetic peptide
VAGGIVAIVVTCLAYYFMRFRRAFG

SEQ ID NO: 16013 - protein, 25 aa, synthetic construct
  REGION 1..25: note = Description of Artificial Sequence: Synthetic peptide
DVTKIKPHNSHEGKTFYVLPNDDTL

SEQ ID NO: 16014 - protein, 25 aa, synthetic construct
  REGION 1..25: note = Description of Artificial Sequence: Synthetic peptide
ADVTKIKPHNSHEGKTFYVLPNDDT

SEQ ID NO: 16015 - protein, 25 aa, synthetic construct
  REGION 1..25: note = Description of Artificial Sequence: Synthetic peptide
VRSIFSRTLETAQNSVRVLQKAAIT

SEQ ID NO: 16016 - protein, 25 aa, synthetic construct
  REGION 1..25: note = Description of Artificial Sequence: Synthetic peptide
LFQHANLDSCKRVLNVVCKTCGQQQ

SEQ ID NO: 16017 - protein, 25 aa, synthetic construct
  REGION 1..25: note = Description of Artificial Sequence: Synthetic peptide
DCVSFCYMHHMELPTGVHAGTDLEG

SEQ ID NO: 16018 - protein, 25 aa, synthetic construct
  REGION 1..25: note = Description of Artificial Sequence: Synthetic peptide
YDCVSFCYMHHMELPTGVHAGTDLE

SEQ ID NO: 16019 - protein, 25 aa, synthetic construct
  REGION 1..25: note = Description of Artificial Sequence: Synthetic peptide
NVYLAVFDKNLYDKLVSSFLEMKSE

SEQ ID NO: 16020 - protein, 25 aa, synthetic construct
  REGION 1..25: note = Description of Artificial Sequence: Synthetic peptide
YIICISTKHFYWFFSNYLKRRVVFN

SEQ ID NO: 16021 - protein, 25 aa, synthetic construct
  REGION 1..25: note = Description of Artificial Sequence: Synthetic peptide
VEVEKGVLPQLEQPYVFIKRSDART

SEQ ID NO: 16022 - protein, 25 aa, synthetic construct
  REGION 1..25: note = Description of Artificial Sequence: Synthetic peptide
VLLSVLQQLRVESSSKLWAQCVQLH

SEQ ID NO: 16023 - protein, 25 aa, synthetic construct
  REGION 1..25: note = Description of Artificial Sequence: Synthetic peptide
VVLLSVLQQLRVESSSKLWAQCVQL

SEQ ID NO: 16024 - protein, 25 aa, synthetic construct
  REGION 1..25: note = Description of Artificial Sequence: Synthetic peptide
VGDIILKPANNSLKITEEVGHTDLM

SEQ ID NO: 16025 - protein, 25 aa, synthetic construct
  REGION 1..25: note = Description of Artificial Sequence: Synthetic peptide
ARTVYDDGARRVWTLMNVLTLVYKV

SEQ ID NO: 16026 - protein, 25 aa, synthetic construct
  REGION 1..25: note = Description of Artificial Sequence: Synthetic peptide
TIEVNSFSGYLKLTDNVYIKNADIV

SEQ ID NO: 16027 - protein, 25 aa, synthetic construct
  REGION 1..25: note = Description of Artificial Sequence: Synthetic peptide
EVNSFSGYLKLTDNVYIKNADIVEE

SEQ ID NO: 16028 - protein, 25 aa, synthetic construct
  REGION 1..25: note = Description of Artificial Sequence: Synthetic peptide
IEVNSFSGYLKLTDNVYIKNADIVE

SEQ ID NO: 16029 - protein, 25 aa, synthetic construct
  REGION 1..25: note = Description of Artificial Sequence: Synthetic peptide
TLQQIELKFNPPALQDAYYRARAGE

SEQ ID NO: 16030 - protein, 25 aa, synthetic construct
  REGION 1..25: note = Description of Artificial Sequence: Synthetic peptide
LTLQQIELKFNPPALQDAYYRARAG

SEQ ID NO: 16031 - protein, 25 aa, synthetic construct
  REGION 1..25: note = Description of Artificial Sequence: Synthetic peptide
GVLTAVVIPTKKAGGTTEMLAKALR

SEQ ID NO: 16032 - protein, 25 aa, synthetic construct
  REGION 1..25: note = Description of Artificial Sequence: Synthetic peptide
KDGTCGLVEVEKGVLPQLEQPYVFI

SEQ ID NO: 16033 - protein, 25 aa, synthetic construct
  REGION 1..25: note = Description of Artificial Sequence: Synthetic peptide
GTCGLVEVEKGVLPQLEQPYVFIKR

SEQ ID NO: 16034 - protein, 25 aa, synthetic construct
  REGION 1..25: note = Description of Artificial Sequence: Synthetic peptide
DGTCGLVEVEKGVLPQLEQPYVFIK

SEQ ID NO: 16035 - protein, 25 aa, synthetic construct
  REGION 1..25: note = Description of Artificial Sequence: Synthetic peptide
ARQHLKDGTCGLVEVEKGVLPQLEQ

SEQ ID NO: 16036 - protein, 25 aa, synthetic construct
  REGION 1..25: note = Description of Artificial Sequence: Synthetic peptide
RQHLKDGTCGLVEVEKGVLPQLEQP

SEQ ID NO: 16037 - protein, 25 aa, synthetic construct
  REGION 1..25: note = Description of Artificial Sequence: Synthetic peptide
EARQHLKDGTCGLVEVEKGVLPQLE

SEQ ID NO: 16038 - protein, 25 aa, synthetic construct
  REGION 1..25: note = Description of Artificial Sequence: Synthetic peptide
EVVLKKLKKSLNVAKSEFDRDAAMQ

SEQ ID NO: 16039 - protein, 25 aa, synthetic construct
  REGION 1..25: note = Description of Artificial Sequence: Synthetic peptide
VVLKKLKKSLNVAKSEFDRDAAMQR

SEQ ID NO: 16040 - protein, 25 aa, synthetic construct
  REGION 1..25: note = Description of Artificial Sequence: Synthetic peptide
SEVVLKKLKKSLNVAKSEFDRDAAM

SEQ ID NO: 16041 - protein, 25 aa, synthetic construct
  REGION 1..25: note = Description of Artificial Sequence: Synthetic peptide
VLKKLKKSLNVAKSEFDRDAAMQRK

SEQ ID NO: 16042 - protein, 25 aa, synthetic construct
  REGION 1..25: note = Description of Artificial Sequence: Synthetic peptide
KLKKSLNVAKSEFDRDAAMQRKLEK

SEQ ID NO: 16043 - protein, 25 aa, synthetic construct
  REGION 1..25: note = Description of Artificial Sequence: Synthetic peptide
NIVTRCLNRVCTNYMPYFFTLLLQL

SEQ ID NO: 16044 - protein, 25 aa, synthetic construct
  REGION 1..25: note = Description of Artificial Sequence: Synthetic peptide
TTTNIVTRCLNRVCTNYMPYFFTLL

SEQ ID NO: 16045 - protein, 25 aa, synthetic construct
  REGION 1..25: note = Description of Artificial Sequence: Synthetic peptide
IVTRCLNRVCTNYMPYFFTLLLQLC

SEQ ID NO: 16046 - protein, 25 aa, synthetic construct
  REGION 1..25: note = Description of Artificial Sequence: Synthetic peptide
TNIVTRCLNRVCTNYMPYFFTLLLQ

SEQ ID NO: 16047 - protein, 25 aa, synthetic construct
  REGION 1..25: note = Description of Artificial Sequence: Synthetic peptide
TTNIVTRCLNRVCTNYMPYFFTLLL

SEQ ID NO: 16048 - protein, 25 aa, synthetic construct
  REGION 1..25: note = Description of Artificial Sequence: Synthetic peptide
KGTHHWLLLTILTSLLVLVQSTQWS

SEQ ID NO: 16049 - protein, 25 aa, synthetic construct
  REGION 1..25: note = Description of Artificial Sequence: Synthetic peptide
GTHHWLLLTILTSLLVLVQSTQWSL

SEQ ID NO: 16050 - protein, 25 aa, synthetic construct
  REGION 1..25: note = Description of Artificial Sequence: Synthetic peptide
TFFPDLNGDVVAIDYKHYTPSFKKG

SEQ ID NO: 16051 - protein, 25 aa, synthetic construct
  REGION 1..25: note = Description of Artificial Sequence: Synthetic peptide
PDLNGDVVAIDYKHYTPSFKKGAKL

SEQ ID NO: 16052 - protein, 25 aa, synthetic construct
  REGION 1..25: note = Description of Artificial Sequence: Synthetic peptide
FPDLNGDVVAIDYKHYTPSFKKGAK

SEQ ID NO: 16053 - protein, 25 aa, synthetic construct
  REGION 1..25: note = Description of Artificial Sequence: Synthetic peptide
DLNGDVVAIDYKHYTPSFKKGAKLL

SEQ ID NO: 16054 - protein, 25 aa, synthetic construct
  REGION 1..25: note = Description of Artificial Sequence: Synthetic peptide
FFPDLNGDVVAIDYKHYTPSFKKGA

SEQ ID NO: 16055 - protein, 25 aa, synthetic construct
  REGION 1..25: note = Description of Artificial Sequence: Synthetic peptide
LNGDVVAIDYKHYTPSFKKGAKLLH

SEQ ID NO: 16056 - protein, 25 aa, synthetic construct
  REGION 1..25: note = Description of Artificial Sequence: Synthetic peptide
VAYFNMVYMPASWVMRIMTWLDMVD

SEQ ID NO: 16057 - protein, 25 aa, synthetic construct
  REGION 1..25: note = Description of Artificial Sequence: Synthetic peptide
AYFNMVYMPASWVMRIMTWLDMVDT

SEQ ID NO: 16058 - protein, 25 aa, synthetic construct
  REGION 1..25: note = Description of Artificial Sequence: Synthetic peptide
VSSFLEMKSEKQVEQKIAEIPKEEV

SEQ ID NO: 16059 - protein, 25 aa, synthetic construct
  REGION 1..25: note = Description of Artificial Sequence: Synthetic peptide
YNRYLALYNKYKYFSGAMDTTSYRE

SEQ ID NO: 16060 - protein, 25 aa, synthetic construct
  REGION 1..25: note = Description of Artificial Sequence: Synthetic peptide
QYNRYLALYNKYKYFSGAMDTTSYR

SEQ ID NO: 16061 - protein, 25 aa, synthetic construct
  REGION 1..25: note = Description of Artificial Sequence: Synthetic peptide
GRWVLNNDYYRSLPGVFCGVDAVNL

SEQ ID NO: 16062 - protein, 25 aa, synthetic construct
  REGION 1..25: note = Description of Artificial Sequence: Synthetic peptide
RWVLNNDYYRSLPGVFCGVDAVNLL

SEQ ID NO: 16063 - protein, 25 aa, synthetic construct
  REGION 1..25: note = Description of Artificial Sequence: Synthetic peptide
KGEDIQLLKSAYENFNQHEVLLAPL

SEQ ID NO: 16064 - protein, 25 aa, synthetic construct
  REGION 1..25: note = Description of Artificial Sequence: Synthetic peptide
NKGEDIQLLKSAYENFNQHEVLLAP

SEQ ID NO: 16065 - protein, 25 aa, synthetic construct
  REGION 1..25: note = Description of Artificial Sequence: Synthetic peptide
VQSKMSDVKCTSVVLLSVLQQLRVE

SEQ ID NO: 16066 - protein, 25 aa, synthetic construct
  REGION 1..25: note = Description of Artificial Sequence: Synthetic peptide
SKMSDVKCTSVVLLSVLQQLRVESS

SEQ ID NO: 16067 - protein, 25 aa, synthetic construct
  REGION 1..25: note = Description of Artificial Sequence: Synthetic peptide
QSKMSDVKCTSVVLLSVLQQLRVES

SEQ ID NO: 16068 - protein, 25 aa, synthetic construct
  REGION 1..25: note = Description of Artificial Sequence: Synthetic peptide
KGFCDLKGKYVQIPTTCANDPVGFT

SEQ ID NO: 16069 - protein, 25 aa, synthetic construct
  REGION 1..25: note = Description of Artificial Sequence: Synthetic peptide
GFCDLKGKYVQIPTTCANDPVGFTL

SEQ ID NO: 16070 - protein, 25 aa, synthetic construct
  REGION 1..25: note = Description of Artificial Sequence: Synthetic peptide
FCDLKGKYVQIPTTCANDPVGFTLK

SEQ ID NO: 16071 - protein, 25 aa, synthetic construct
  REGION 1..25: note = Description of Artificial Sequence: Synthetic peptide
PKGFCDLKGKYVQIPTTCANDPVGF

SEQ ID NO: 16072 - protein, 25 aa, synthetic construct
  REGION 1..25: note = Description of Artificial Sequence: Synthetic peptide
CDLKGKYVQIPTTCANDPVGFTLKN

SEQ ID NO: 16073 - protein, 25 aa, synthetic construct
  REGION 1..25: note = Description of Artificial Sequence: Synthetic peptide
SWLMWLIINLVQMAPISAMVRMYIF

SEQ ID NO: 16074 - protein, 25 aa, synthetic construct
  REGION 1..25: note = Description of Artificial Sequence: Synthetic peptide
LTAVVIPTKKAGGTTEMLAKALRKV

SEQ ID NO: 16075 - protein, 25 aa, synthetic construct
  REGION 1..25: note = Description of Artificial Sequence: Synthetic peptide
VLTAVVIPTKKAGGTTEMLAKALRK

SEQ ID NO: 16076 - protein, 25 aa, synthetic construct
  REGION 1..25: note = Description of Artificial Sequence: Synthetic peptide
HVVGPNVNKGEDIQLLKSAYENFNQ

SEQ ID NO: 16077 - protein, 25 aa, synthetic construct
  REGION 1..25: note = Description of Artificial Sequence: Synthetic peptide
TQYNRYLALYNKYKYFSGAMDTTSY

SEQ ID NO: 16078 - protein, 25 aa, synthetic construct
  REGION 1..25: note = Description of Artificial Sequence: Synthetic peptide
LTQYNRYLALYNKYKYFSGAMDTTS

SEQ ID NO: 16079 - protein, 25 aa, synthetic construct
  REGION 1..25: note = Description of Artificial Sequence: Synthetic peptide
YHNESGLKTILRKGGRTIAFGGCVF

SEQ ID NO: 16080 - protein, 25 aa, synthetic construct
  REGION 1..25: note = Description of Artificial Sequence: Synthetic peptide
LAEYHNESGLKTILRKGGRTIAFGG

SEQ ID NO: 16081 - protein, 25 aa, synthetic construct
  REGION 1..25: note = Description of Artificial Sequence: Synthetic peptide
AEYHNESGLKTILRKGGRTIAFGGC

SEQ ID NO: 16082 - protein, 25 aa, synthetic construct
  REGION 1..25: note = Description of Artificial Sequence: Synthetic peptide
EYHNESGLKTILRKGGRTIAFGGCV

SEQ ID NO: 16083 - protein, 25 aa, synthetic construct
  REGION 1..25: note = Description of Artificial Sequence: Synthetic peptide
MWLIINLVQMAPISAMVRMYIFFAS

SEQ ID NO: 16084 - protein, 25 aa, synthetic construct
  REGION 1..25: note = Description of Artificial Sequence: Synthetic peptide
QTMLFTMLRKLDNDALNNIINNARD

SEQ ID NO: 16085 - protein, 25 aa, synthetic construct
  REGION 1..25: note = Description of Artificial Sequence: Synthetic peptide
MQTMLFTMLRKLDNDALNNIINNAR

SEQ ID NO: 16086 - protein, 25 aa, synthetic construct
  REGION 1..25: note = Description of Artificial Sequence: Synthetic peptide
PYIVGDVVQEGVLTAVVIPTKKAGG

SEQ ID NO: 16087 - protein, 25 aa, synthetic construct
  REGION 1..25: note = Description of Artificial Sequence: Synthetic peptide
YIVGDVVQEGVLTAVVIPTKKAGGT

SEQ ID NO: 16088 - protein, 25 aa, synthetic construct
  REGION 1..25: note = Description of Artificial Sequence: Synthetic peptide
TGTGQAITVTPEANMDQESFGGASC

SEQ ID NO: 16089 - protein, 25 aa, synthetic construct
  REGION 1..25: note = Description of Artificial Sequence: Synthetic peptide
DSCNNYMLTYNKVENMTPRDLGACI

SEQ ID NO: 16090 - protein, 25 aa, synthetic construct
  REGION 1..25: note = Description of Artificial Sequence: Synthetic peptide
LFDESGEFKLASHMYCSFYPPDEDE

SEQ ID NO: 16091 - protein, 25 aa, synthetic construct
  REGION 1..25: note = Description of Artificial Sequence: Synthetic peptide
FDESGEFKLASHMYCSFYPPDEDEE

SEQ ID NO: 16092 - protein, 25 aa, synthetic construct
  REGION 1..25: note = Description of Artificial Sequence: Synthetic peptide
YLFDESGEFKLASHMYCSFYPPDED

SEQ ID NO: 16093 - protein, 25 aa, synthetic construct
  REGION 1..25: note = Description of Artificial Sequence: Synthetic peptide
YYLFDESGEFKLASHMYCSFYPPDE

SEQ ID NO: 16094 - protein, 25 aa, synthetic construct
  REGION 1..25: note = Description of Artificial Sequence: Synthetic peptide
FLGRYMSALNHTKKWKYPQVNGLTS

SEQ ID NO: 16095 - protein, 25 aa, synthetic construct
  REGION 1..25: note = Description of Artificial Sequence: Synthetic peptide
LGRYMSALNHTKKWKYPQVNGLTSI

SEQ ID NO: 16096 - protein, 25 aa, synthetic construct
  REGION 1..25: note = Description of Artificial Sequence: Synthetic peptide
VVDYGARFYFYTSKTTVASLINTLN

SEQ ID NO: 16097 - protein, 25 aa, synthetic construct
  REGION 1..25: note = Description of Artificial Sequence: Synthetic peptide
VDYGARFYFYTSKTTVASLINTLND

SEQ ID NO: 16098 - protein, 25 aa, synthetic construct
  REGION 1..25: note = Description of Artificial Sequence: Synthetic peptide
DYGARFYFYTSKTTVASLINTLNDL

SEQ ID NO: 16099 - protein, 25 aa, synthetic construct
  REGION 1..25: note = Description of Artificial Sequence: Synthetic peptide
EGVVDYGARFYFYTSKTTVASLINT

SEQ ID NO: 16100 - protein, 25 aa, synthetic construct
  REGION 1..25: note = Description of Artificial Sequence: Synthetic peptide
GVVDYGARFYFYTSKTTVASLINTL

SEQ ID NO: 16101 - protein, 25 aa, synthetic construct
  REGION 1..25: note = Description of Artificial Sequence: Synthetic peptide
QEAYEQAVANGDSEVVLKKLKKSLN

SEQ ID NO: 16102 - protein, 25 aa, synthetic construct
  REGION 1..25: note = Description of Artificial Sequence: Synthetic peptide
KMLCTHTGTGQAITVTPEANMDQES

SEQ ID NO: 16103 - protein, 25 aa, synthetic construct
  REGION 1..25: note = Description of Artificial Sequence: Synthetic peptide
CDTFCAGSTFISDEVARDLSLQFKR

SEQ ID NO: 16104 - protein, 25 aa, synthetic construct
  REGION 1..25: note = Description of Artificial Sequence: Synthetic peptide
VNCDTFCAGSTFISDEVARDLSLQF

SEQ ID NO: 16105 - protein, 25 aa, synthetic construct
  REGION 1..25: note = Description of Artificial Sequence: Synthetic peptide
NCDTFCAGSTFISDEVARDLSLQFK

SEQ ID NO: 16106 - protein, 25 aa, synthetic construct
  REGION 1..25: note = Description of Artificial Sequence: Synthetic peptide
MSALNHTKKWKYPQVNGLTSIKWAD

SEQ ID NO: 16107 - protein, 25 aa, synthetic construct
  REGION 1..25: note = Description of Artificial Sequence: Synthetic peptide
YMSALNHTKKWKYPQVNGLTSIKWA

SEQ ID NO: 16108 - protein, 25 aa, synthetic construct
  REGION 1..25: note = Description of Artificial Sequence: Synthetic peptide
SALNHTKKWKYPQVNGLTSIKWADN

SEQ ID NO: 16109 - protein, 25 aa, synthetic construct
  REGION 1..25: note = Description of Artificial Sequence: Synthetic peptide
DVVAIDYKHYTPSFKKGAKLLHKPI

SEQ ID NO: 16110 - protein, 25 aa, synthetic construct
  REGION 1..25: note = Description of Artificial Sequence: Synthetic peptide
VVAIDYKHYTPSFKKGAKLLHKPIV

SEQ ID NO: 16111 - protein, 25 aa, synthetic construct
  REGION 1..25: note = Description of Artificial Sequence: Synthetic peptide
NGDVVAIDYKHYTPSFKKGAKLLHK

SEQ ID NO: 16112 - protein, 25 aa, synthetic construct
  REGION 1..25: note = Description of Artificial Sequence: Synthetic peptide
ASFDNFKFVCDNIKFADDLNQLTGY

SEQ ID NO: 16113 - protein, 25 aa, synthetic construct
  REGION 1..25: note = Description of Artificial Sequence: Synthetic peptide
FDNFKFVCDNIKFADDLNQLTGYKK

SEQ ID NO: 16114 - protein, 25 aa, synthetic construct
  REGION 1..25: note = Description of Artificial Sequence: Synthetic peptide
DNFKFVCDNIKFADDLNQLTGYKKP

SEQ ID NO: 16115 - protein, 25 aa, synthetic construct
  REGION 1..25: note = Description of Artificial Sequence: Synthetic peptide
SFDNFKFVCDNIKFADDLNQLTGYK

SEQ ID NO: 16116 - protein, 25 aa, synthetic construct
  REGION 1..25: note = Description of Artificial Sequence: Synthetic peptide
PEEHFIETISLAGSYKDWSYSGQST

SEQ ID NO: 16117 - protein, 25 aa, synthetic construct
  REGION 1..25: note = Description of Artificial Sequence: Synthetic peptide
LKPVLDWLEEKFKEGVEFLRDGWEI

SEQ ID NO: 16118 - protein, 25 aa, synthetic construct
  REGION 1..25: note = Description of Artificial Sequence: Synthetic peptide
KLKPVLDWLEEKFKEGVEFLRDGWE

SEQ ID NO: 16119 - protein, 25 aa, synthetic construct
  REGION 1..25: note = Description of Artificial Sequence: Synthetic peptide
TAQNSVRVLQKAAITILDGISQYSL

SEQ ID NO: 16120 - protein, 25 aa, synthetic construct
  REGION 1..25: note = Description of Artificial Sequence: Synthetic peptide
ETAQNSVRVLQKAAITILDGISQYS

SEQ ID NO: 16121 - protein, 25 aa, synthetic construct
  REGION 1..25: note = Description of Artificial Sequence: Synthetic peptide
GQPITNCVKMLCTHTGTGQAITVTP

SEQ ID NO: 16122 - protein, 25 aa, synthetic construct
  REGION 1..25: note = Description of Artificial Sequence: Synthetic peptide
GKASCTLSEQLDFIDTKRGVYCCRE

SEQ ID NO: 16123 - protein, 25 aa, synthetic construct
  REGION 1..25: note = Description of Artificial Sequence: Synthetic peptide
AKNTVKSVGKFCLEASFNYLKSPNF

SEQ ID NO: 16124 - protein, 25 aa, synthetic construct
  REGION 1..25: note = Description of Artificial Sequence: Synthetic peptide
IAKNTVKSVGKFCLEASFNYLKSPN

SEQ ID NO: 16125 - protein, 25 aa, synthetic construct
  REGION 1..25: note = Description of Artificial Sequence: Synthetic peptide
SAVKRTIKGTHHWLLLTILTSLLVL

SEQ ID NO: 16126 - protein, 25 aa, synthetic construct
  REGION 1..25: note = Description of Artificial Sequence: Synthetic peptide
DYDCVSFCYMHHMELPTGVHAGTDL

SEQ ID NO: 16127 - protein, 25 aa, synthetic construct
  REGION 1..25: note = Description of Artificial Sequence: Synthetic peptide
SWVMRIMTWLDMVDTSLSGFKLKDC

SEQ ID NO: 16128 - protein, 25 aa, synthetic construct
  REGION 1..25: note = Description of Artificial Sequence: Synthetic peptide
VMRIMTWLDMVDTSLSGFKLKDCVM

SEQ ID NO: 16129 - protein, 25 aa, synthetic construct
  REGION 1..25: note = Description of Artificial Sequence: Synthetic peptide
WVMRIMTWLDMVDTSLSGFKLKDCV

SEQ ID NO: 16130 - protein, 25 aa, synthetic construct
  REGION 1..25: note = Description of Artificial Sequence: Synthetic peptide
IVEEAKKVKPTVVVNAANVYLKHGG

SEQ ID NO: 16131 - protein, 25 aa, synthetic construct
  REGION 1..25: note = Description of Artificial Sequence: Synthetic peptide
DIVEEAKKVKPTVVVNAANVYLKHG

SEQ ID NO: 16132 - protein, 25 aa, synthetic construct
  REGION 1..25: note = Description of Artificial Sequence: Synthetic peptide
GLMLLEIKDTEKYCALAPNMMVTNN

SEQ ID NO: 16133 - protein, 25 aa, synthetic construct
  REGION 1..25: note = Description of Artificial Sequence: Synthetic peptide
VKSREETGLLMPLKAPKEIIFLEGE

SEQ ID NO: 16134 - protein, 25 aa, synthetic construct
  REGION 1..25: note = Description of Artificial Sequence: Synthetic peptide
SREETGLLMPLKAPKEIIFLEGETL

SEQ ID NO: 16135 - protein, 25 aa, synthetic construct
  REGION 1..25: note = Description of Artificial Sequence: Synthetic peptide
EETGLLMPLKAPKEIIFLEGETLPT

SEQ ID NO: 16136 - protein, 25 aa, synthetic construct
  REGION 1..25: note = Description of Artificial Sequence: Synthetic peptide
REETGLLMPLKAPKEIIFLEGETLP

SEQ ID NO: 16137 - protein, 25 aa, synthetic construct
  REGION 1..25: note = Description of Artificial Sequence: Synthetic peptide
KSREETGLLMPLKAPKEIIFLEGET

SEQ ID NO: 16138 - protein, 25 aa, synthetic construct
  REGION 1..25: note = Description of Artificial Sequence: Synthetic peptide
PTEVLTEEVVLKTGDLQPLEQPTSE

SEQ ID NO: 16139 - protein, 25 aa, synthetic construct
  REGION 1..25: note = Description of Artificial Sequence: Synthetic peptide
SEGLNDNLLEILQKEKVNINIVGDF

SEQ ID NO: 16140 - protein, 25 aa, synthetic construct
  REGION 1..25: note = Description of Artificial Sequence: Synthetic peptide
EGSEGLNDNLLEILQKEKVNINIVG

SEQ ID NO: 16141 - protein, 25 aa, synthetic construct
  REGION 1..25: note = Description of Artificial Sequence: Synthetic peptide
VVGEGSEGLNDNLLEILQKEKVNIN

SEQ ID NO: 16142 - protein, 25 aa, synthetic construct
  REGION 1..25: note = Description of Artificial Sequence: Synthetic peptide
EGLNDNLLEILQKEKVNINIVGDFK

SEQ ID NO: 16143 - protein, 25 aa, synthetic construct
  REGION 1..25: note = Description of Artificial Sequence: Synthetic peptide
GEGSEGLNDNLLEILQKEKVNINIV

SEQ ID NO: 16144 - protein, 25 aa, synthetic construct
  REGION 1..25: note = Description of Artificial Sequence: Synthetic peptide
VGEGSEGLNDNLLEILQKEKVNINI

SEQ ID NO: 16145 - protein, 25 aa, synthetic construct
  REGION 1..25: note = Description of Artificial Sequence: Synthetic peptide
GSEGLNDNLLEILQKEKVNINIVGD

SEQ ID NO: 16146 - protein, 25 aa, synthetic construct
  REGION 1..25: note = Description of Artificial Sequence: Synthetic peptide
TGVVGEGSEGLNDNLLEILQKEKVN

SEQ ID NO: 16147 - protein, 25 aa, synthetic construct
  REGION 1..25: note = Description of Artificial Sequence: Synthetic peptide
GVVGEGSEGLNDNLLEILQKEKVNI

SEQ ID NO: 16148 - protein, 25 aa, synthetic construct
  REGION 1..25: note = Description of Artificial Sequence: Synthetic peptide
AVKRTIKGTHHWLLLTILTSLLVLV

SEQ ID NO: 16149 - protein, 25 aa, synthetic construct
  REGION 1..25: note = Description of Artificial Sequence: Synthetic peptide
KRTIKGTHHWLLLTILTSLLVLVQS

SEQ ID NO: 16150 - protein, 25 aa, synthetic construct
  REGION 1..25: note = Description of Artificial Sequence: Synthetic peptide
VKRTIKGTHHWLLLTILTSLLVLVQ

SEQ ID NO: 16151 - protein, 25 aa, synthetic construct
  REGION 1..25: note = Description of Artificial Sequence: Synthetic peptide
VYMPASWVMRIMTWLDMVDTSLSGF

SEQ ID NO: 16152 - protein, 25 aa, synthetic construct
  REGION 1..25: note = Description of Artificial Sequence: Synthetic peptide
MVYMPASWVMRIMTWLDMVDTSLSG

SEQ ID NO: 16153 - protein, 25 aa, synthetic construct
  REGION 1..25: note = Description of Artificial Sequence: Synthetic peptide
NMVYMPASWVMRIMTWLDMVDTSLS

SEQ ID NO: 16154 - protein, 25 aa, synthetic construct
  REGION 1..25: note = Description of Artificial Sequence: Synthetic peptide
LDMCASLKELLQNGMNGRTILGSAL

SEQ ID NO: 16155 - protein, 25 aa, synthetic construct
  REGION 1..25: note = Description of Artificial Sequence: Synthetic peptide
GGRFVLALLSDLQDLKWARFPKSDG

SEQ ID NO: 16156 - protein, 25 aa, synthetic construct
  REGION 1..25: note = Description of Artificial Sequence: Synthetic peptide
PISAMVRMYIFFASFYYVWKSYVHV

SEQ ID NO: 16157 - protein, 25 aa, synthetic construct
  REGION 1..25: note = Description of Artificial Sequence: Synthetic peptide
ISAMVRMYIFFASFYYVWKSYVHVV

SEQ ID NO: 16158 - protein, 25 aa, synthetic construct
  REGION 1..25: note = Description of Artificial Sequence: Synthetic peptide
QTGIAVLDMCASLKELLQNGMNGRT

SEQ ID NO: 16159 - protein, 25 aa, synthetic construct
  REGION 1..25: note = Description of Artificial Sequence: Synthetic peptide
TGIAVLDMCASLKELLQNGMNGRTI

SEQ ID NO: 16160 - protein, 25 aa, synthetic construct
  REGION 1..25: note = Description of Artificial Sequence: Synthetic peptide
SAQTGIAVLDMCASLKELLQNGMNG

SEQ ID NO: 16161 - protein, 25 aa, synthetic construct
  REGION 1..25: note = Description of Artificial Sequence: Synthetic peptide
AQTGIAVLDMCASLKELLQNGMNGR

SEQ ID NO: 16162 - protein, 25 aa, synthetic construct
  REGION 1..25: note = Description of Artificial Sequence: Synthetic peptide
LSAQTGIAVLDMCASLKELLQNGMN

SEQ ID NO: 16163 - protein, 25 aa, synthetic construct
  REGION 1..25: note = Description of Artificial Sequence: Synthetic peptide
KGLDYKAFKQIVESCGNFKVTKGKA

SEQ ID NO: 16164 - protein, 25 aa, synthetic construct
  REGION 1..25: note = Description of Artificial Sequence: Synthetic peptide
VKGLDYKAFKQIVESCGNFKVTKGK

SEQ ID NO: 16165 - protein, 25 aa, synthetic construct
  REGION 1..25: note = Description of Artificial Sequence: Synthetic peptide
LKLRSDVLLPLTQYNRYLALYNKYK

SEQ ID NO: 16166 - protein, 25 aa, synthetic construct
  REGION 1..25: note = Description of Artificial Sequence: Synthetic peptide
LRSDVLLPLTQYNRYLALYNKYKYF

SEQ ID NO: 16167 - protein, 25 aa, synthetic construct
  REGION 1..25: note = Description of Artificial Sequence: Synthetic peptide
KLRSDVLLPLTQYNRYLALYNKYKY

SEQ ID NO: 16168 - protein, 25 aa, synthetic construct
  REGION 1..25: note = Description of Artificial Sequence: Synthetic peptide
FVDDIVKTDGTLMIERFVSLAIDAY

SEQ ID NO: 16169 - protein, 25 aa, synthetic construct
  REGION 1..25: note = Description of Artificial Sequence: Synthetic peptide
LTKGTLEPEYFNSVCRLMKTIGPDM

SEQ ID NO: 16170 - protein, 25 aa, synthetic construct
  REGION 1..25: note = Description of Artificial Sequence: Synthetic peptide
KGTLEPEYFNSVCRLMKTIGPDMFL

SEQ ID NO: 16171 - protein, 25 aa, synthetic construct
  REGION 1..25: note = Description of Artificial Sequence: Synthetic peptide
QIYKTPPIKDFGGFNFSQILPDPSK

SEQ ID NO: 16172 - protein, 25 aa, synthetic construct
  REGION 1..25: note = Description of Artificial Sequence: Synthetic peptide
IYKTPPIKDFGGFNFSQILPDPSKP

SEQ ID NO: 16173 - protein, 25 aa, synthetic construct
  REGION 1..25: note = Description of Artificial Sequence: Synthetic peptide
GTLEPEYFNSVCRLMKTIGPDMFLG

SEQ ID NO: 16174 - protein, 25 aa, synthetic construct
  REGION 1..25: note = Description of Artificial Sequence: Synthetic peptide
FTVEKGIYQTSNFRVQPTESIVRFP

SEQ ID NO: 16175 - protein, 25 aa, synthetic construct
  REGION 1..25: note = Description of Artificial Sequence: Synthetic peptide
KSFTVEKGIYQTSNFRVQPTESIVR

SEQ ID NO: 16176 - protein, 25 aa, synthetic construct
  REGION 1..25: note = Description of Artificial Sequence: Synthetic peptide
SFTVEKGIYQTSNFRVQPTESIVRF

SEQ ID NO: 16177 - protein, 25 aa, synthetic construct
  REGION 1..25: note = Description of Artificial Sequence: Synthetic peptide
SFKELLVYAADPAMHAASGNLLLDK

SEQ ID NO: 16178 - protein, 25 aa, synthetic construct
  REGION 1..25: note = Description of Artificial Sequence: Synthetic peptide
MAGNGGDAALALLLLDRLNQLESKM

SEQ ID NO: 16179 - protein, 25 aa, synthetic construct
  REGION 1..25: note = Description of Artificial Sequence: Synthetic peptide
NGGDAALALLLLDRLNQLESKMSGK

SEQ ID NO: 16180 - protein, 25 aa, synthetic construct
  REGION 1..25: note = Description of Artificial Sequence: Synthetic peptide
AGNGGDAALALLLLDRLNQLESKMS

SEQ ID NO: 16181 - protein, 25 aa, synthetic construct
  REGION 1..25: note = Description of Artificial Sequence: Synthetic peptide
GNGGDAALALLLLDRLNQLESKMSG

SEQ ID NO: 16182 - protein, 25 aa, synthetic construct
  REGION 1..25: note = Description of Artificial Sequence: Synthetic peptide
EKGIYQTSNFRVQPTESIVRFPNIT

SEQ ID NO: 16183 - protein, 25 aa, synthetic construct
  REGION 1..25: note = Description of Artificial Sequence: Synthetic peptide
RCPAEIVDTVSALVYDNKLKAHKDK

SEQ ID NO: 16184 - protein, 25 aa, synthetic construct
  REGION 1..25: note = Description of Artificial Sequence: Synthetic peptide
TNAGDYILANTCTERLKLFAAETLK

SEQ ID NO: 16185 - protein, 25 aa, synthetic construct
  REGION 1..25: note = Description of Artificial Sequence: Synthetic peptide
NAGDYILANTCTERLKLFAAETLKA

SEQ ID NO: 16186 - protein, 25 aa, synthetic construct
  REGION 1..25: note = Description of Artificial Sequence: Synthetic peptide
SSRLSFKELLVYAADPAMHAASGNL

SEQ ID NO: 16187 - protein, 25 aa, synthetic construct
  REGION 1..25: note = Description of Artificial Sequence: Synthetic peptide
PLNRNYVFTGYRVTKNSKVQIGEYT

SEQ ID NO: 16188 - protein, 25 aa, synthetic construct
  REGION 1..25: note = Description of Artificial Sequence: Synthetic peptide
VFTGYRVTKNSKVQIGEYTFEKGDY

SEQ ID NO: 16189 - protein, 25 aa, synthetic construct
  REGION 1..25: note = Description of Artificial Sequence: Synthetic peptide
RNYVFTGYRVTKNSKVQIGEYTFEK

SEQ ID NO: 16190 - protein, 25 aa, synthetic construct
  REGION 1..25: note = Description of Artificial Sequence: Synthetic peptide
NRNYVFTGYRVTKNSKVQIGEYTFE

SEQ ID NO: 16191 - protein, 25 aa, synthetic construct
  REGION 1..25: note = Description of Artificial Sequence: Synthetic peptide
YVFTGYRVTKNSKVQIGEYTFEKGD

SEQ ID NO: 16192 - protein, 25 aa, synthetic construct
  REGION 1..25: note = Description of Artificial Sequence: Synthetic peptide
LNRNYVFTGYRVTKNSKVQIGEYTF

SEQ ID NO: 16193 - protein, 25 aa, synthetic construct
  REGION 1..25: note = Description of Artificial Sequence: Synthetic peptide
FTGYRVTKNSKVQIGEYTFEKGDYG

SEQ ID NO: 16194 - protein, 25 aa, synthetic construct
  REGION 1..25: note = Description of Artificial Sequence: Synthetic peptide
NYVFTGYRVTKNSKVQIGEYTFEKG

SEQ ID NO: 16195 - protein, 25 aa, synthetic construct
  REGION 1..25: note = Description of Artificial Sequence: Synthetic peptide
WVYKQFDTYNLWNTFTRLQSLENVA

SEQ ID NO: 16196 - protein, 25 aa, synthetic construct
  REGION 1..25: note = Description of Artificial Sequence: Synthetic peptide
VYKQFDTYNLWNTFTRLQSLENVAF

SEQ ID NO: 16197 - protein, 25 aa, synthetic construct
  REGION 1..25: note = Description of Artificial Sequence: Synthetic peptide
EIPRRNVATLQAENVTGLFKDCSKV

SEQ ID NO: 16198 - protein, 25 aa, synthetic construct
  REGION 1..25: note = Description of Artificial Sequence: Synthetic peptide
LVKPSFYVYSRVKNLNSSRVPDLLV

SEQ ID NO: 16199 - protein, 25 aa, synthetic construct
  REGION 1..25: note = Description of Artificial Sequence: Synthetic peptide
SLVKPSFYVYSRVKNLNSSRVPDLL

SEQ ID NO: 16200 - protein, 25 aa, synthetic construct
  REGION 1..25: note = Description of Artificial Sequence: Synthetic peptide
DYNYKLPDDFTGCVIAWNSNNLDSK

SEQ ID NO: 16201 - protein, 25 aa, synthetic construct
  REGION 1..25: note = Description of Artificial Sequence: Synthetic peptide
IPKDMTYRRLISMMGFKMNYQVNGY

SEQ ID NO: 16202 - protein, 25 aa, synthetic construct
  REGION 1..25: note = Description of Artificial Sequence: Synthetic peptide
IKPVPEVKILNNLGVDIAANTVIWD

SEQ ID NO: 16203 - protein, 25 aa, synthetic construct
  REGION 1..25: note = Description of Artificial Sequence: Synthetic peptide
NIKPVPEVKILNNLGVDIAANTVIW

SEQ ID NO: 16204 - protein, 25 aa, synthetic construct
  REGION 1..25: note = Description of Artificial Sequence: Synthetic peptide
KRNIKPVPEVKILNNLGVDIAANTV

SEQ ID NO: 16205 - protein, 25 aa, synthetic construct
  REGION 1..25: note = Description of Artificial Sequence: Synthetic peptide
RNIKPVPEVKILNNLGVDIAANTVI

SEQ ID NO: 16206 - protein, 25 aa, synthetic construct
  REGION 1..25: note = Description of Artificial Sequence: Synthetic peptide
NFKDQVILLNKHIDAYKTFPPTEPK

SEQ ID NO: 16207 - protein, 25 aa, synthetic construct
  REGION 1..25: note = Description of Artificial Sequence: Synthetic peptide
FKDQVILLNKHIDAYKTFPPTEPKK

SEQ ID NO: 16208 - protein, 25 aa, synthetic construct
  REGION 1..25: note = Description of Artificial Sequence: Synthetic peptide
PNFKDQVILLNKHIDAYKTFPPTEP

SEQ ID NO: 16209 - protein, 25 aa, synthetic construct
  REGION 1..25: note = Description of Artificial Sequence: Synthetic peptide
GLALYYPSARIVYTACSHAAVDALC

SEQ ID NO: 16210 - protein, 25 aa, synthetic construct
  REGION 1..25: note = Description of Artificial Sequence: Synthetic peptide
KVSIWNLDYIINLIIKNLSKSLTEN

SEQ ID NO: 16211 - protein, 25 aa, synthetic construct
  REGION 1..25: note = Description of Artificial Sequence: Synthetic peptide
WNLDYIINLIIKNLSKSLTENKYSQ

SEQ ID NO: 16212 - protein, 25 aa, synthetic construct
  REGION 1..25: note = Description of Artificial Sequence: Synthetic peptide
IWNLDYIINLIIKNLSKSLTENKYS

SEQ ID NO: 16213 - protein, 25 aa, synthetic construct
  REGION 1..25: note = Description of Artificial Sequence: Synthetic peptide
VSIWNLDYIINLIIKNLSKSLTENK

SEQ ID NO: 16214 - protein, 25 aa, synthetic construct
  REGION 1..25: note = Description of Artificial Sequence: Synthetic peptide
SIWNLDYIINLIIKNLSKSLTENKY

SEQ ID NO: 16215 - protein, 25 aa, synthetic construct
  REGION 1..25: note = Description of Artificial Sequence: Synthetic peptide
NMFITREEAIRHVRAWIGFDVEGCH

SEQ ID NO: 16216 - protein, 25 aa, synthetic construct
  REGION 1..25: note = Description of Artificial Sequence: Synthetic peptide
PNMFITREEAIRHVRAWIGFDVEGC

SEQ ID NO: 16217 - protein, 25 aa, synthetic construct
  REGION 1..25: note = Description of Artificial Sequence: Synthetic peptide
FITREEAIRHVRAWIGFDVEGCHAT

SEQ ID NO: 16218 - protein, 25 aa, synthetic construct
  REGION 1..25: note = Description of Artificial Sequence: Synthetic peptide
ITREEAIRHVRAWIGFDVEGCHATR

SEQ ID NO: 16219 - protein, 25 aa, synthetic construct
  REGION 1..25: note = Description of Artificial Sequence: Synthetic peptide
MFITREEAIRHVRAWIGFDVEGCHA

SEQ ID NO: 16220 - protein, 25 aa, synthetic construct
  REGION 1..25: note = Description of Artificial Sequence: Synthetic peptide
AKRNIKPVPEVKILNNLGVDIAANT

SEQ ID NO: 16221 - protein, 25 aa, synthetic construct
  REGION 1..25: note = Description of Artificial Sequence: Synthetic peptide
ADSNGTITVEELKKLLEQWNLVIGF

SEQ ID NO: 16222 - protein, 25 aa, synthetic construct
  REGION 1..25: note = Description of Artificial Sequence: Synthetic peptide
PDDFTGCVIAWNSNNLDSKVGGNYN

SEQ ID NO: 16223 - protein, 25 aa, synthetic construct
  REGION 1..25: note = Description of Artificial Sequence: Synthetic peptide
ITRFQTLLALHRSYLTPGDSSSGWT

SEQ ID NO: 16224 - protein, 25 aa, synthetic construct
  REGION 1..25: note = Description of Artificial Sequence: Synthetic peptide
NITRFQTLLALHRSYLTPGDSSSGW

SEQ ID NO: 16225 - protein, 25 aa, synthetic construct
  REGION 1..25: note = Description of Artificial Sequence: Synthetic peptide
KLNVGDYFVLTSHTVMPLSAPTLVP

SEQ ID NO: 16226 - protein, 25 aa, synthetic construct
  REGION 1..25: note = Description of Artificial Sequence: Synthetic peptide
TTYKLNVGDYFVLTSHTVMPLSAPT

SEQ ID NO: 16227 - protein, 25 aa, synthetic construct
  REGION 1..25: note = Description of Artificial Sequence: Synthetic peptide
YKLNVGDYFVLTSHTVMPLSAPTLV

SEQ ID NO: 16228 - protein, 25 aa, synthetic construct
  REGION 1..25: note = Description of Artificial Sequence: Synthetic peptide
TYKLNVGDYFVLTSHTVMPLSAPTL

SEQ ID NO: 16229 - protein, 25 aa, synthetic construct
  REGION 1..25: note = Description of Artificial Sequence: Synthetic peptide
SQGLVASIKNFKSVLYYQNNVFMSE

SEQ ID NO: 16230 - protein, 25 aa, synthetic construct
  REGION 1..25: note = Description of Artificial Sequence: Synthetic peptide
ASQGLVASIKNFKSVLYYQNNVFMS

SEQ ID NO: 16231 - protein, 25 aa, synthetic construct
  REGION 1..25: note = Description of Artificial Sequence: Synthetic peptide
STYASQGLVASIKNFKSVLYYQNNV

SEQ ID NO: 16232 - protein, 25 aa, synthetic construct
  REGION 1..25: note = Description of Artificial Sequence: Synthetic peptide
YASQGLVASIKNFKSVLYYQNNVFM

SEQ ID NO: 16233 - protein, 25 aa, synthetic construct
  REGION 1..25: note = Description of Artificial Sequence: Synthetic peptide
TYASQGLVASIKNFKSVLYYQNNVF

SEQ ID NO: 16234 - protein, 25 aa, synthetic construct
  REGION 1..25: note = Description of Artificial Sequence: Synthetic peptide
WQPGVAMPNLYKMQRMLLEKCDLQN

SEQ ID NO: 16235 - protein, 25 aa, synthetic construct
  REGION 1..25: note = Description of Artificial Sequence: Synthetic peptide
AWQPGVAMPNLYKMQRMLLEKCDLQ

SEQ ID NO: 16236 - protein, 25 aa, synthetic construct
  REGION 1..25: note = Description of Artificial Sequence: Synthetic peptide
QPGVAMPNLYKMQRMLLEKCDLQNY

SEQ ID NO: 16237 - protein, 25 aa, synthetic construct
  REGION 1..25: note = Description of Artificial Sequence: Synthetic peptide
PGVAMPNLYKMQRMLLEKCDLQNYG

SEQ ID NO: 16238 - protein, 25 aa, synthetic construct
  REGION 1..25: note = Description of Artificial Sequence: Synthetic peptide
TKGTLEPEYFNSVCRLMKTIGPDMF

SEQ ID NO: 16239 - protein, 25 aa, synthetic construct
  REGION 1..25: note = Description of Artificial Sequence: Synthetic peptide
LLTKGTLEPEYFNSVCRLMKTIGPD

SEQ ID NO: 16240 - protein, 25 aa, synthetic construct
  REGION 1..25: note = Description of Artificial Sequence: Synthetic peptide
YKTPPIKDFGGFNFSQILPDPSKPS

SEQ ID NO: 16241 - protein, 25 aa, synthetic construct
  REGION 1..25: note = Description of Artificial Sequence: Synthetic peptide
KTPPIKDFGGFNFSQILPDPSKPSK

SEQ ID NO: 16242 - protein, 25 aa, synthetic construct
  REGION 1..25: note = Description of Artificial Sequence: Synthetic peptide
TVEKGIYQTSNFRVQPTESIVRFPN

SEQ ID NO: 16243 - protein, 25 aa, synthetic construct
  REGION 1..25: note = Description of Artificial Sequence: Synthetic peptide
SKCVCSVIDLLLDDFVEIIKSQDLS

SEQ ID NO: 16244 - protein, 25 aa, synthetic construct
  REGION 1..25: note = Description of Artificial Sequence: Synthetic peptide
KCVCSVIDLLLDDFVEIIKSQDLSV

SEQ ID NO: 16245 - protein, 25 aa, synthetic construct
  REGION 1..25: note = Description of Artificial Sequence: Synthetic peptide
CVCSVIDLLLDDFVEIIKSQDLSVV

SEQ ID NO: 16246 - protein, 25 aa, synthetic construct
  REGION 1..25: note = Description of Artificial Sequence: Synthetic peptide
SEDAQGMDNLACEDLKPVSEEVVEN

SEQ ID NO: 16247 - protein, 25 aa, synthetic construct
  REGION 1..25: note = Description of Artificial Sequence: Synthetic peptide
EDAQGMDNLACEDLKPVSEEVVENP

SEQ ID NO: 16248 - protein, 25 aa, synthetic construct
  REGION 1..25: note = Description of Artificial Sequence: Synthetic peptide
DAQGMDNLACEDLKPVSEEVVENPT

SEQ ID NO: 16249 - protein, 25 aa, synthetic construct
  REGION 1..25: note = Description of Artificial Sequence: Synthetic peptide
YMGTLSYEQFKKGVQIPCTCGKQAT

SEQ ID NO: 16250 - protein, 25 aa, synthetic construct
  REGION 1..25: note = Description of Artificial Sequence: Synthetic peptide
MYMGTLSYEQFKKGVQIPCTCGKQA

SEQ ID NO: 16251 - protein, 25 aa, synthetic construct
  REGION 1..25: note = Description of Artificial Sequence: Synthetic peptide
VMYMGTLSYEQFKKGVQIPCTCGKQ

SEQ ID NO: 16252 - protein, 25 aa, synthetic construct
  REGION 1..25: note = Description of Artificial Sequence: Synthetic peptide
MGTLSYEQFKKGVQIPCTCGKQATK

SEQ ID NO: 16253 - protein, 25 aa, synthetic construct
  REGION 1..25: note = Description of Artificial Sequence: Synthetic peptide
VQLTSQWLTNIFGTVYEKLKPVLDW

SEQ ID NO: 16254 - protein, 25 aa, synthetic construct
  REGION 1..25: note = Description of Artificial Sequence: Synthetic peptide
QLTSQWLTNIFGTVYEKLKPVLDWL

SEQ ID NO: 16255 - protein, 25 aa, synthetic construct
  REGION 1..25: note = Description of Artificial Sequence: Synthetic peptide
NICYTPSKLIEYTDFATSACVLAAE

SEQ ID NO: 16256 - protein, 25 aa, synthetic construct
  REGION 1..25: note = Description of Artificial Sequence: Synthetic peptide
KKPASRELKVTFFPDLNGDVVAIDY

SEQ ID NO: 16257 - protein, 25 aa, synthetic construct
  REGION 1..25: note = Description of Artificial Sequence: Synthetic peptide
YKKPASRELKVTFFPDLNGDVVAID

SEQ ID NO: 16258 - protein, 25 aa, synthetic construct
  REGION 1..25: note = Description of Artificial Sequence: Synthetic peptide
KPASRELKVTFFPDLNGDVVAIDYK

SEQ ID NO: 16259 - protein, 25 aa, synthetic construct
  REGION 1..25: note = Description of Artificial Sequence: Synthetic peptide
SGVVTTVMFLARGIVFMCVEYCPIF

SEQ ID NO: 16260 - protein, 25 aa, synthetic construct
  REGION 1..25: note = Description of Artificial Sequence: Synthetic peptide
VLALLSDLQDLKWARFPKSDGTGTI

SEQ ID NO: 16261 - protein, 25 aa, synthetic construct
  REGION 1..25: note = Description of Artificial Sequence: Synthetic peptide
RFVLALLSDLQDLKWARFPKSDGTG

SEQ ID NO: 16262 - protein, 25 aa, synthetic construct
  REGION 1..25: note = Description of Artificial Sequence: Synthetic peptide
FVLALLSDLQDLKWARFPKSDGTGT

SEQ ID NO: 16263 - protein, 25 aa, synthetic construct
  REGION 1..25: note = Description of Artificial Sequence: Synthetic peptide
WPLIVTALRANSAVKLQNNELSPVA

SEQ ID NO: 16264 - protein, 25 aa, synthetic construct
  REGION 1..25: note = Description of Artificial Sequence: Synthetic peptide
PLIVTALRANSAVKLQNNELSPVAL

SEQ ID NO: 16265 - protein, 25 aa, synthetic construct
  REGION 1..25: note = Description of Artificial Sequence: Synthetic peptide
AWPLIVTALRANSAVKLQNNELSPV

SEQ ID NO: 16266 - protein, 25 aa, synthetic construct
  REGION 1..25: note = Description of Artificial Sequence: Synthetic peptide
CSVIDLLLDDFVEIIKSQDLSVVSK

SEQ ID NO: 16267 - protein, 25 aa, synthetic construct
  REGION 1..25: note = Description of Artificial Sequence: Synthetic peptide
TSLEIPRRNVATLQAENVTGLFKDC

SEQ ID NO: 16268 - protein, 25 aa, synthetic construct
  REGION 1..25: note = Description of Artificial Sequence: Synthetic peptide
FTSLEIPRRNVATLQAENVTGLFKD

SEQ ID NO: 16269 - protein, 25 aa, synthetic construct
  REGION 1..25: note = Description of Artificial Sequence: Synthetic peptide
QFTSLEIPRRNVATLQAENVTGLFK

SEQ ID NO: 16270 - protein, 25 aa, synthetic construct
  REGION 1..25: note = Description of Artificial Sequence: Synthetic peptide
SLEIPRRNVATLQAENVTGLFKDCS

SEQ ID NO: 16271 - protein, 25 aa, synthetic construct
  REGION 1..25: note = Description of Artificial Sequence: Synthetic peptide
GGFNFSQILPDPSKPSKRSFIEDLL

SEQ ID NO: 16272 - protein, 25 aa, synthetic construct
  REGION 1..25: note = Description of Artificial Sequence: Synthetic peptide
FLGYFCTCYFGLFCLLNRYFRLTLG

SEQ ID NO: 16273 - protein, 25 aa, synthetic construct
  REGION 1..25: note = Description of Artificial Sequence: Synthetic peptide
LGYFCTCYFGLFCLLNRYFRLTLGV

SEQ ID NO: 16274 - protein, 25 aa, synthetic construct
  REGION 1..25: note = Description of Artificial Sequence: Synthetic peptide
IKDFGGFNFSQILPDPSKPSKRSFI

SEQ ID NO: 16275 - protein, 25 aa, synthetic construct
  REGION 1..25: note = Description of Artificial Sequence: Synthetic peptide
PIKDFGGFNFSQILPDPSKPSKRSF

SEQ ID NO: 16276 - protein, 25 aa, synthetic construct
  REGION 1..25: note = Description of Artificial Sequence: Synthetic peptide
SILSPLYAFASEAARVVRSIFSRTL

SEQ ID NO: 16277 - protein, 25 aa, synthetic construct
  REGION 1..25: note = Description of Artificial Sequence: Synthetic peptide
CNSSTCMMCYKRNRATRVECTTIVN

SEQ ID NO: 16278 - protein, 25 aa, synthetic construct
  REGION 1..25: note = Description of Artificial Sequence: Synthetic peptide
YNYKLPDDFTGCVIAWNSNNLDSKV

SEQ ID NO: 16279 - protein, 25 aa, synthetic construct
  REGION 1..25: note = Description of Artificial Sequence: Synthetic peptide
SPLYAFASEAARVVRSIFSRTLETA

SEQ ID NO: 16280 - protein, 25 aa, synthetic construct
  REGION 1..25: note = Description of Artificial Sequence: Synthetic peptide
FAVHFISNSWLMWLIINLVQMAPIS

SEQ ID NO: 16281 - protein, 25 aa, synthetic construct
  REGION 1..25: note = Description of Artificial Sequence: Synthetic peptide
YYTSNPTTFHLDGEVITFDNLKTLL

SEQ ID NO: 16282 - protein, 25 aa, synthetic construct
  REGION 1..25: note = Description of Artificial Sequence: Synthetic peptide
VYYTSNPTTFHLDGEVITFDNLKTL

SEQ ID NO: 16283 - protein, 25 aa, synthetic construct
  REGION 1..25: note = Description of Artificial Sequence: Synthetic peptide
LPKEITVATSRTLSYYKLGASQRVA

SEQ ID NO: 16284 - protein, 25 aa, synthetic construct
  REGION 1..25: note = Description of Artificial Sequence: Synthetic peptide
DGCNSSTCMMCYKRNRATRVECTTI

SEQ ID NO: 16285 - protein, 25 aa, synthetic construct
  REGION 1..25: note = Description of Artificial Sequence: Synthetic peptide
VDGCNSSTCMMCYKRNRATRVECTT

SEQ ID NO: 16286 - protein, 25 aa, synthetic construct
  REGION 1..25: note = Description of Artificial Sequence: Synthetic peptide
LLLDDFVEIIKSQDLSVVSKVVKVT

SEQ ID NO: 16287 - protein, 25 aa, synthetic construct
  REGION 1..25: note = Description of Artificial Sequence: Synthetic peptide
LLDDFVEIIKSQDLSVVSKVVKVTI

SEQ ID NO: 16288 - protein, 25 aa, synthetic construct
  REGION 1..25: note = Description of Artificial Sequence: Synthetic peptide
DLLLDDFVEIIKSQDLSVVSKVVKV

SEQ ID NO: 16289 - protein, 25 aa, synthetic construct
  REGION 1..25: note = Description of Artificial Sequence: Synthetic peptide
KNNLPFKLTCATTRQVVNVVTTKIA

SEQ ID NO: 16290 - protein, 25 aa, synthetic construct
  REGION 1..25: note = Description of Artificial Sequence: Synthetic peptide
NNLPFKLTCATTRQVVNVVTTKIAL

SEQ ID NO: 16291 - protein, 25 aa, synthetic construct
  REGION 1..25: note = Description of Artificial Sequence: Synthetic peptide
NSTVLSFCAFAVDAAKAYKDYLASG

SEQ ID NO: 16292 - protein, 25 aa, synthetic construct
  REGION 1..25: note = Description of Artificial Sequence: Synthetic peptide
LYAFASEAARVVRSIFSRTLETAQN

SEQ ID NO: 16293 - protein, 25 aa, synthetic construct
  REGION 1..25: note = Description of Artificial Sequence: Synthetic peptide
KPPPGDQFKHLIPLMYKGLPWNVVR

SEQ ID NO: 16294 - protein, 25 aa, synthetic construct
  REGION 1..25: note = Description of Artificial Sequence: Synthetic peptide
ALYYPSARIVYTACSHAAVDALCEK

SEQ ID NO: 16295 - protein, 25 aa, synthetic construct
  REGION 1..25: note = Description of Artificial Sequence: Synthetic peptide
YYPSARIVYTACSHAAVDALCEKAL

SEQ ID NO: 16296 - protein, 25 aa, synthetic construct
  REGION 1..25: note = Description of Artificial Sequence: Synthetic peptide
LALYYPSARIVYTACSHAAVDALCE

SEQ ID NO: 16297 - protein, 25 aa, synthetic construct
  REGION 1..25: note = Description of Artificial Sequence: Synthetic peptide
LYYPSARIVYTACSHAAVDALCEKA

SEQ ID NO: 16298 - protein, 25 aa, synthetic construct
  REGION 1..25: note = Description of Artificial Sequence: Synthetic peptide
FNGECPNFVFPLNSIIKTIQPRVEK

SEQ ID NO: 16299 - protein, 25 aa, synthetic construct
  REGION 1..25: note = Description of Artificial Sequence: Synthetic peptide
TNNAMQVESDDYIATNGPLKVGGSC

SEQ ID NO: 16300 - protein, 25 aa, synthetic construct
  REGION 1..25: note = Description of Artificial Sequence: Synthetic peptide
VLGSLAATVRLQAGNATEVPANSTV

SEQ ID NO: 16301 - protein, 25 aa, synthetic construct
  REGION 1..25: note = Description of Artificial Sequence: Synthetic peptide
MVLGSLAATVRLQAGNATEVPANST

SEQ ID NO: 16302 - protein, 25 aa, synthetic construct
  REGION 1..25: note = Description of Artificial Sequence: Synthetic peptide
RSAAKKNNLPFKLTCATTRQVVNVV

SEQ ID NO: 16303 - protein, 25 aa, synthetic construct
  REGION 1..25: note = Description of Artificial Sequence: Synthetic peptide
IRSAAKKNNLPFKLTCATTRQVVNV

SEQ ID NO: 16304 - protein, 25 aa, synthetic construct
  REGION 1..25: note = Description of Artificial Sequence: Synthetic peptide
EQKSILSPLYAFASEAARVVRSIFS

SEQ ID NO: 16305 - protein, 25 aa, synthetic construct
  REGION 1..25: note = Description of Artificial Sequence: Synthetic peptide
NIGEQKSILSPLYAFASEAARVVRS

SEQ ID NO: 16306 - protein, 25 aa, synthetic construct
  REGION 1..25: note = Description of Artificial Sequence: Synthetic peptide
IGEQKSILSPLYAFASEAARVVRSI

SEQ ID NO: 16307 - protein, 25 aa, synthetic construct
  REGION 1..25: note = Description of Artificial Sequence: Synthetic peptide
GEQKSILSPLYAFASEAARVVRSIF

SEQ ID NO: 16308 - protein, 25 aa, synthetic construct
  REGION 1..25: note = Description of Artificial Sequence: Synthetic peptide
NLKTLLSLREVRTIKVFTTVDNINL

SEQ ID NO: 16309 - protein, 25 aa, synthetic construct
  REGION 1..25: note = Description of Artificial Sequence: Synthetic peptide
LKTLLSLREVRTIKVFTTVDNINLH

SEQ ID NO: 16310 - protein, 25 aa, synthetic construct
  REGION 1..25: note = Description of Artificial Sequence: Synthetic peptide
REVGFVVPGLPGTILRTTNGDFLHF

SEQ ID NO: 16311 - protein, 25 aa, synthetic construct
  REGION 1..25: note = Description of Artificial Sequence: Synthetic peptide
TREVGFVVPGLPGTILRTTNGDFLH

SEQ ID NO: 16312 - protein, 25 aa, synthetic construct
  REGION 1..25: note = Description of Artificial Sequence: Synthetic peptide
EVRTIKVFTTVDNINLHTQVVDMSM

SEQ ID NO: 16313 - protein, 25 aa, synthetic construct
  REGION 1..25: note = Description of Artificial Sequence: Synthetic peptide
PYFFTLLLQLCTFTRSTNSRIKASM

SEQ ID NO: 16314 - protein, 25 aa, synthetic construct
  REGION 1..25: note = Description of Artificial Sequence: Synthetic peptide
YFFTLLLQLCTFTRSTNSRIKASMP

SEQ ID NO: 16315 - protein, 25 aa, synthetic construct
  REGION 1..25: note = Description of Artificial Sequence: Synthetic peptide
QLCTFTRSTNSRIKASMPTTIAKNT

SEQ ID NO: 16316 - protein, 25 aa, synthetic construct
  REGION 1..25: note = Description of Artificial Sequence: Synthetic peptide
LQLCTFTRSTNSRIKASMPTTIAKN

SEQ ID NO: 16317 - protein, 25 aa, synthetic construct
  REGION 1..25: note = Description of Artificial Sequence: Synthetic peptide
LLQLCTFTRSTNSRIKASMPTTIAK

SEQ ID NO: 16318 - protein, 25 aa, synthetic construct
  REGION 1..25: note = Description of Artificial Sequence: Synthetic peptide
RVSAKPPPGDQFKHLIPLMYKGLPW

SEQ ID NO: 16319 - protein, 25 aa, synthetic construct
  REGION 1..25: note = Description of Artificial Sequence: Synthetic peptide
AKPPPGDQFKHLIPLMYKGLPWNVV

SEQ ID NO: 16320 - protein, 25 aa, synthetic construct
  REGION 1..25: note = Description of Artificial Sequence: Synthetic peptide
VSAKPPPGDQFKHLIPLMYKGLPWN

SEQ ID NO: 16321 - protein, 25 aa, synthetic construct
  REGION 1..25: note = Description of Artificial Sequence: Synthetic peptide
SAKPPPGDQFKHLIPLMYKGLPWNV

SEQ ID NO: 16322 - protein, 25 aa, synthetic construct
  REGION 1..25: note = Description of Artificial Sequence: Synthetic peptide
KLVNKFLALCADSIIIGGAKLKALN

SEQ ID NO: 16323 - protein, 25 aa, synthetic construct
  REGION 1..25: note = Description of Artificial Sequence: Synthetic peptide
LGTEVNEFACVVADAVIKTLQPVSE

SEQ ID NO: 16324 - protein, 25 aa, synthetic construct
  REGION 1..25: note = Description of Artificial Sequence: Synthetic peptide
ELGTEVNEFACVVADAVIKTLQPVS

SEQ ID NO: 16325 - protein, 25 aa, synthetic construct
  REGION 1..25: note = Description of Artificial Sequence: Synthetic peptide
TVELGTEVNEFACVVADAVIKTLQP

SEQ ID NO: 16326 - protein, 25 aa, synthetic construct
  REGION 1..25: note = Description of Artificial Sequence: Synthetic peptide
VELGTEVNEFACVVADAVIKTLQPV

SEQ ID NO: 16327 - protein, 25 aa, synthetic construct
  REGION 1..25: note = Description of Artificial Sequence: Synthetic peptide
TLLLQLCTFTRSTNSRIKASMPTTI

SEQ ID NO: 16328 - protein, 25 aa, synthetic construct
  REGION 1..25: note = Description of Artificial Sequence: Synthetic peptide
MPNMLRIMASLVLARKHTTCCSLSH

SEQ ID NO: 16329 - protein, 25 aa, synthetic construct
  REGION 1..25: note = Description of Artificial Sequence: Synthetic peptide
GLNGYTVEEAKTVLKKCKSAFYILP

SEQ ID NO: 16330 - protein, 25 aa, synthetic construct
  REGION 1..25: note = Description of Artificial Sequence: Synthetic peptide
VPYCYDTNVLEGSVAYESLRPDTRY

SEQ ID NO: 16331 - protein, 25 aa, synthetic construct
  REGION 1..25: note = Description of Artificial Sequence: Synthetic peptide
NYITTYPGQGLNGYTVEEAKTVLKK

SEQ ID NO: 16332 - protein, 25 aa, synthetic construct
  REGION 1..25: note = Description of Artificial Sequence: Synthetic peptide
FYVYANGGKGFCKLHNWNCVNCDTF

SEQ ID NO: 16333 - protein, 25 aa, synthetic construct
  REGION 1..25: note = Description of Artificial Sequence: Synthetic peptide
YANGGKGFCKLHNWNCVNCDTFCAG

SEQ ID NO: 16334 - protein, 25 aa, synthetic construct
  REGION 1..25: note = Description of Artificial Sequence: Synthetic peptide
ANGGKGFCKLHNWNCVNCDTFCAGS

SEQ ID NO: 16335 - protein, 25 aa, synthetic construct
  REGION 1..25: note = Description of Artificial Sequence: Synthetic peptide
VYANGGKGFCKLHNWNCVNCDTFCA

SEQ ID NO: 16336 - protein, 25 aa, synthetic construct
  REGION 1..25: note = Description of Artificial Sequence: Synthetic peptide
YVYANGGKGFCKLHNWNCVNCDTFC

SEQ ID NO: 16337 - protein, 25 aa, synthetic construct
  REGION 1..25: note = Description of Artificial Sequence: Synthetic peptide
DTANPKTPKYKFVRIQPGQTFSVLA

SEQ ID NO: 16338 - protein, 25 aa, synthetic construct
  REGION 1..25: note = Description of Artificial Sequence: Synthetic peptide
TANPKTPKYKFVRIQPGQTFSVLAC

SEQ ID NO: 16339 - protein, 25 aa, synthetic construct
  REGION 1..25: note = Description of Artificial Sequence: Synthetic peptide
ANPKTPKYKFVRIQPGQTFSVLACY

SEQ ID NO: 16340 - protein, 25 aa, synthetic construct
  REGION 1..25: note = Description of Artificial Sequence: Synthetic peptide
NPKTPKYKFVRIQPGQTFSVLACYN

SEQ ID NO: 16341 - protein, 25 aa, synthetic construct
  REGION 1..25: note = Description of Artificial Sequence: Synthetic peptide
YYHTTDPSFLGRYMSALNHTKKWKY

SEQ ID NO: 16342 - protein, 25 aa, synthetic construct
  REGION 1..25: note = Description of Artificial Sequence: Synthetic peptide
YHTTDPSFLGRYMSALNHTKKWKYP

SEQ ID NO: 16343 - protein, 25 aa, synthetic construct
  REGION 1..25: note = Description of Artificial Sequence: Synthetic peptide
LAKALRKVPTDNYITTYPGQGLNGY

SEQ ID NO: 16344 - protein, 25 aa, synthetic construct
  REGION 1..25: note = Description of Artificial Sequence: Synthetic peptide
MLAKALRKVPTDNYITTYPGQGLNG

SEQ ID NO: 16345 - protein, 25 aa, synthetic construct
  REGION 1..25: note = Description of Artificial Sequence: Synthetic peptide
NFVFPLNSIIKTIQPRVEKKKLDGF

SEQ ID NO: 16346 - protein, 25 aa, synthetic construct
  REGION 1..25: note = Description of Artificial Sequence: Synthetic peptide
VFPLNSIIKTIQPRVEKKKLDGFMG

SEQ ID NO: 16347 - protein, 25 aa, synthetic construct
  REGION 1..25: note = Description of Artificial Sequence: Synthetic peptide
PNFVFPLNSIIKTIQPRVEKKKLDG

SEQ ID NO: 16348 - protein, 25 aa, synthetic construct
  REGION 1..25: note = Description of Artificial Sequence: Synthetic peptide
FVFPLNSIIKTIQPRVEKKKLDGFM

SEQ ID NO: 16349 - protein, 25 aa, synthetic construct
  REGION 1..25: note = Description of Artificial Sequence: Synthetic peptide
FPLNSIIKTIQPRVEKKKLDGFMGR

SEQ ID NO: 16350 - protein, 25 aa, synthetic construct
  REGION 1..25: note = Description of Artificial Sequence: Synthetic peptide
YCYDTNVLEGSVAYESLRPDTRYVL

SEQ ID NO: 16351 - protein, 25 aa, synthetic construct
  REGION 1..25: note = Description of Artificial Sequence: Synthetic peptide
CYDTNVLEGSVAYESLRPDTRYVLM

SEQ ID NO: 16352 - protein, 25 aa, synthetic construct
  REGION 1..25: note = Description of Artificial Sequence: Synthetic peptide
VKDFMSLSEQLRKQIRSAAKKNNLP

SEQ ID NO: 16353 - protein, 25 aa, synthetic construct
  REGION 1..25: note = Description of Artificial Sequence: Synthetic peptide
DNLACEDLKPVSEEVVENPTIQKDV

SEQ ID NO: 16354 - protein, 25 aa, synthetic construct
  REGION 1..25: note = Description of Artificial Sequence: Synthetic peptide
MDNLACEDLKPVSEEVVENPTIQKD

SEQ ID NO: 16355 - protein, 25 aa, synthetic construct
  REGION 1..25: note = Description of Artificial Sequence: Synthetic peptide
DTNVLEGSVAYESLRPDTRYVLMDG

SEQ ID NO: 16356 - protein, 25 aa, synthetic construct
  REGION 1..25: note = Description of Artificial Sequence: Synthetic peptide
ASKIITLKKRWQLALSKGVHFVCNL

SEQ ID NO: 16357 - protein, 25 aa, synthetic construct
  REGION 1..25: note = Description of Artificial Sequence: Synthetic peptide
SDVLLPLTQYNRYLALYNKYKYFSG

SEQ ID NO: 16358 - protein, 25 aa, synthetic construct
  REGION 1..25: note = Description of Artificial Sequence: Synthetic peptide
VLEGSVAYESLRPDTRYVLMDGSII

SEQ ID NO: 16359 - protein, 25 aa, synthetic construct
  REGION 1..25: note = Description of Artificial Sequence: Synthetic peptide
LEGSVAYESLRPDTRYVLMDGSIIQ

SEQ ID NO: 16360 - protein, 25 aa, synthetic construct
  REGION 1..25: note = Description of Artificial Sequence: Synthetic peptide
EDLLIRKSNHNFLVQAGNVQLRVIG

SEQ ID NO: 16361 - protein, 25 aa, synthetic construct
  REGION 1..25: note = Description of Artificial Sequence: Synthetic peptide
NYEDLLIRKSNHNFLVQAGNVQLRV

SEQ ID NO: 16362 - protein, 25 aa, synthetic construct
  REGION 1..25: note = Description of Artificial Sequence: Synthetic peptide
YEDLLIRKSNHNFLVQAGNVQLRVI

SEQ ID NO: 16363 - protein, 25 aa, synthetic construct
  REGION 1..25: note = Description of Artificial Sequence: Synthetic peptide
IPGIPKDMTYRRLISMMGFKMNYQV

SEQ ID NO: 16364 - protein, 25 aa, synthetic construct
  REGION 1..25: note = Description of Artificial Sequence: Synthetic peptide
VDIPGIPKDMTYRRLISMMGFKMNY

SEQ ID NO: 16365 - protein, 25 aa, synthetic construct
  REGION 1..25: note = Description of Artificial Sequence: Synthetic peptide
DIPGIPKDMTYRRLISMMGFKMNYQ

SEQ ID NO: 16366 - protein, 25 aa, synthetic construct
  REGION 1..25: note = Description of Artificial Sequence: Synthetic peptide
ADDLNQLTGYKKPASRELKVTFFPD

SEQ ID NO: 16367 - protein, 25 aa, synthetic construct
  REGION 1..25: note = Description of Artificial Sequence: Synthetic peptide
AFEYYHTTDPSFLGRYMSALNHTKK

SEQ ID NO: 16368 - protein, 25 aa, synthetic construct
  REGION 1..25: note = Description of Artificial Sequence: Synthetic peptide
APNMMVTNNTFTLKGGAPTKVTFGD

SEQ ID NO: 16369 - protein, 25 aa, synthetic construct
  REGION 1..25: note = Description of Artificial Sequence: Synthetic peptide
PNLAWPLIVTALRANSAVKLQNNEL

SEQ ID NO: 16370 - protein, 25 aa, synthetic construct
  REGION 1..25: note = Description of Artificial Sequence: Synthetic peptide
SPNLAWPLIVTALRANSAVKLQNNE

SEQ ID NO: 16371 - protein, 25 aa, synthetic construct
  REGION 1..25: note = Description of Artificial Sequence: Synthetic peptide
NLAWPLIVTALRANSAVKLQNNELS

SEQ ID NO: 16372 - protein, 25 aa, synthetic construct
  REGION 1..25: note = Description of Artificial Sequence: Synthetic peptide
EAFEYYHTTDPSFLGRYMSALNHTK

SEQ ID NO: 16373 - protein, 25 aa, synthetic construct
  REGION 1..25: note = Description of Artificial Sequence: Synthetic peptide
TTEVVGDIILKPANNSLKITEEVGH

SEQ ID NO: 16374 - protein, 25 aa, synthetic construct
  REGION 1..25: note = Description of Artificial Sequence: Synthetic peptide
EVVGDIILKPANNSLKITEEVGHTD

SEQ ID NO: 16375 - protein, 25 aa, synthetic construct
  REGION 1..25: note = Description of Artificial Sequence: Synthetic peptide
VVGDIILKPANNSLKITEEVGHTDL

SEQ ID NO: 16376 - protein, 25 aa, synthetic construct
  REGION 1..25: note = Description of Artificial Sequence: Synthetic peptide
TEVVGDIILKPANNSLKITEEVGHT

SEQ ID NO: 16377 - protein, 25 aa, synthetic construct
  REGION 1..25: note = Description of Artificial Sequence: Synthetic peptide
KEGVEFLRDGWEIVKFISTCACEIV

SEQ ID NO: 16378 - protein, 25 aa, synthetic construct
  REGION 1..25: note = Description of Artificial Sequence: Synthetic peptide
WAKRNIKPVPEVKILNNLGVDIAAN

SEQ ID NO: 16379 - protein, 25 aa, synthetic construct
  REGION 1..25: note = Description of Artificial Sequence: Synthetic peptide
MDNSPNLAWPLIVTALRANSAVKLQ

SEQ ID NO: 16380 - protein, 25 aa, synthetic construct
  REGION 1..25: note = Description of Artificial Sequence: Synthetic peptide
KTPKYKFVRIQPGQTFSVLACYNGS

SEQ ID NO: 16381 - protein, 25 aa, synthetic construct
  REGION 1..25: note = Description of Artificial Sequence: Synthetic peptide
PKTPKYKFVRIQPGQTFSVLACYNG

SEQ ID NO: 16382 - protein, 25 aa, synthetic construct
  REGION 1..25: note = Description of Artificial Sequence: Synthetic peptide
TSGRWVLNNDYYRSLPGVFCGVDAV

SEQ ID NO: 16383 - protein, 25 aa, synthetic construct
  REGION 1..25: note = Description of Artificial Sequence: Synthetic peptide
SGRWVLNNDYYRSLPGVFCGVDAVN

SEQ ID NO: 16384 - protein, 25 aa, synthetic construct
  REGION 1..25: note = Description of Artificial Sequence: Synthetic peptide
TSNSFDVLKSEDAQGMDNLACEDLK

SEQ ID NO: 16385 - protein, 25 aa, synthetic construct
  REGION 1..25: note = Description of Artificial Sequence: Synthetic peptide
GLNNLNRGMVLGSLAATVRLQAGNA

SEQ ID NO: 16386 - protein, 25 aa, synthetic construct
  REGION 1..25: note = Description of Artificial Sequence: Synthetic peptide
VRQCSGVTFQSAVKRTIKGTHHWLL

SEQ ID NO: 16387 - protein, 25 aa, synthetic construct
  REGION 1..25: note = Description of Artificial Sequence: Synthetic peptide
PLTQYNRYLALYNKYKYFSGAMDTT

SEQ ID NO: 16388 - protein, 25 aa, synthetic construct
  REGION 1..25: note = Description of Artificial Sequence: Synthetic peptide
KLNEEIAIILASFSASTSAFVETVK

SEQ ID NO: 16389 - protein, 25 aa, synthetic construct
  REGION 1..25: note = Description of Artificial Sequence: Synthetic peptide
ADQAMTQMYKQARSEDKRAKVTSAM

SEQ ID NO: 16390 - protein, 25 aa, synthetic construct
  REGION 1..25: note = Description of Artificial Sequence: Synthetic peptide
MADQAMTQMYKQARSEDKRAKVTSA

SEQ ID NO: 16391 - protein, 25 aa, synthetic construct
  REGION 1..25: note = Description of Artificial Sequence: Synthetic peptide
KMADQAMTQMYKQARSEDKRAKVTS

SEQ ID NO: 16392 - protein, 25 aa, synthetic construct
  REGION 1..25: note = Description of Artificial Sequence: Synthetic peptide
LWSTKPVETSNSFDVLKSEDAQGMD

SEQ ID NO: 16393 - protein, 25 aa, synthetic construct
  REGION 1..25: note = Description of Artificial Sequence: Synthetic peptide
CVPLNIIPLTTAAKLMVVIPDYNTY

SEQ ID NO: 16394 - protein, 25 aa, synthetic construct
  REGION 1..25: note = Description of Artificial Sequence: Synthetic peptide
AVANGDSEVVLKKLKKSLNVAKSEF

SEQ ID NO: 16395 - protein, 25 aa, synthetic construct
  REGION 1..25: note = Description of Artificial Sequence: Synthetic peptide
VANGDSEVVLKKLKKSLNVAKSEFD

SEQ ID NO: 16396 - protein, 25 aa, synthetic construct
  REGION 1..25: note = Description of Artificial Sequence: Synthetic peptide
LNNDYYRSLPGVFCGVDAVNLLTNM

SEQ ID NO: 16397 - protein, 25 aa, synthetic construct
  REGION 1..25: note = Description of Artificial Sequence: Synthetic peptide
KIALKGGKIVNNWLKQLIKVTLVFL

SEQ ID NO: 16398 - protein, 25 aa, synthetic construct
  REGION 1..25: note = Description of Artificial Sequence: Synthetic peptide
TKIALKGGKIVNNWLKQLIKVTLVF

SEQ ID NO: 16399 - protein, 25 aa, synthetic construct
  REGION 1..25: note = Description of Artificial Sequence: Synthetic peptide
IALKGGKIVNNWLKQLIKVTLVFLF

SEQ ID NO: 16400 - protein, 25 aa, synthetic construct
  REGION 1..25: note = Description of Artificial Sequence: Synthetic peptide
TTKIALKGGKIVNNWLKQLIKVTLV

SEQ ID NO: 16401 - protein, 25 aa, synthetic construct
  REGION 1..25: note = Description of Artificial Sequence: Synthetic peptide
PCSVCLSGLDSLDTYPSLETIQITI

SEQ ID NO: 16402 - protein, 25 aa, synthetic construct
  REGION 1..25: note = Description of Artificial Sequence: Synthetic peptide
IPCSVCLSGLDSLDTYPSLETIQIT

SEQ ID NO: 16403 - protein, 25 aa, synthetic construct
  REGION 1..25: note = Description of Artificial Sequence: Synthetic peptide
CSVCLSGLDSLDTYPSLETIQITIS

SEQ ID NO: 16404 - protein, 25 aa, synthetic construct
  REGION 1..25: note = Description of Artificial Sequence: Synthetic peptide
SVCLSGLDSLDTYPSLETIQITISS

SEQ ID NO: 16405 - protein, 25 aa, synthetic construct
  REGION 1..25: note = Description of Artificial Sequence: Synthetic peptide
SIPCSVCLSGLDSLDTYPSLETIQI

SEQ ID NO: 16406 - protein, 25 aa, synthetic construct
  REGION 1..25: note = Description of Artificial Sequence: Synthetic peptide
GSIPCSVCLSGLDSLDTYPSLETIQ

SEQ ID NO: 16407 - protein, 25 aa, synthetic construct
  REGION 1..25: note = Description of Artificial Sequence: Synthetic peptide
VCLSGLDSLDTYPSLETIQITISSF

SEQ ID NO: 16408 - protein, 25 aa, synthetic construct
  REGION 1..25: note = Description of Artificial Sequence: Synthetic peptide
WVLNNDYYRSLPGVFCGVDAVNLLT

SEQ ID NO: 16409 - protein, 25 aa, synthetic construct
  REGION 1..25: note = Description of Artificial Sequence: Synthetic peptide
KLWAQCVQLHNDILLAKDTTEAFEK

SEQ ID NO: 16410 - protein, 25 aa, synthetic construct
  REGION 1..25: note = Description of Artificial Sequence: Synthetic peptide
LWAQCVQLHNDILLAKDTTEAFEKM

SEQ ID NO: 16411 - protein, 25 aa, synthetic construct
  REGION 1..25: note = Description of Artificial Sequence: Synthetic peptide
AQCVQLHNDILLAKDTTEAFEKMVS

SEQ ID NO: 16412 - protein, 25 aa, synthetic construct
  REGION 1..25: note = Description of Artificial Sequence: Synthetic peptide
WAQCVQLHNDILLAKDTTEAFEKMV

SEQ ID NO: 16413 - protein, 25 aa, synthetic construct
  REGION 1..25: note = Description of Artificial Sequence: Synthetic peptide
TVSVSSPDAVTAYNGYLTSSSKTPE

SEQ ID NO: 16414 - protein, 25 aa, synthetic construct
  REGION 1..25: note = Description of Artificial Sequence: Synthetic peptide
ALIISVTSNYSGVVTTVMFLARGIV

SEQ ID NO: 16415 - protein, 25 aa, synthetic construct
  REGION 1..25: note = Description of Artificial Sequence: Synthetic peptide
ILMTARTVYDDGARRVWTLMNVLTL

SEQ ID NO: 16416 - protein, 25 aa, synthetic construct
  REGION 1..25: note = Description of Artificial Sequence: Synthetic peptide
LKKSLNVAKSEFDRDAAMQRKLEKM

SEQ ID NO: 16417 - protein, 25 aa, synthetic construct
  REGION 1..25: note = Description of Artificial Sequence: Synthetic peptide
NFKFVCDNIKFADDLNQLTGYKKPA

SEQ ID NO: 16418 - protein, 25 aa, synthetic construct
  REGION 1..25: note = Description of Artificial Sequence: Synthetic peptide
FKFVCDNIKFADDLNQLTGYKKPAS

SEQ ID NO: 16419 - protein, 25 aa, synthetic construct
  REGION 1..25: note = Description of Artificial Sequence: Synthetic peptide
EQAVANGDSEVVLKKLKKSLNVAKS

SEQ ID NO: 16420 - protein, 25 aa, synthetic construct
  REGION 1..25: note = Description of Artificial Sequence: Synthetic peptide
VTLVFLFVAAIFYLITPVHVMSKHT

SEQ ID NO: 16421 - protein, 25 aa, synthetic construct
  REGION 1..25: note = Description of Artificial Sequence: Synthetic peptide
TLVFLFVAAIFYLITPVHVMSKHTD

SEQ ID NO: 16422 - protein, 25 aa, synthetic construct
  REGION 1..25: note = Description of Artificial Sequence: Synthetic peptide
QIVTCAKEIKESVQTFFKLVNKFLA

SEQ ID NO: 16423 - protein, 25 aa, synthetic construct
  REGION 1..25: note = Description of Artificial Sequence: Synthetic peptide
IVTCAKEIKESVQTFFKLVNKFLAL

SEQ ID NO: 16424 - protein, 25 aa, synthetic construct
  REGION 1..25: note = Description of Artificial Sequence: Synthetic peptide
TGDSCNNYMLTYNKVENMTPRDLGA

SEQ ID NO: 16425 - protein, 25 aa, synthetic construct
  REGION 1..25: note = Description of Artificial Sequence: Synthetic peptide
VTGDSCNNYMLTYNKVENMTPRDLG

SEQ ID NO: 16426 - protein, 25 aa, synthetic construct
  REGION 1..25: note = Description of Artificial Sequence: Synthetic peptide
EVTGDSCNNYMLTYNKVENMTPRDL

SEQ ID NO: 16427 - protein, 25 aa, synthetic construct
  REGION 1..25: note = Description of Artificial Sequence: Synthetic peptide
IEVTGDSCNNYMLTYNKVENMTPRD

SEQ ID NO: 16428 - protein, 25 aa, synthetic construct
  REGION 1..25: note = Description of Artificial Sequence: Synthetic peptide
GSVGFNIDYDCVSFCYMHHMELPTG

SEQ ID NO: 16429 - protein, 25 aa, synthetic construct
  REGION 1..25: note = Description of Artificial Sequence: Synthetic peptide
KYCALAPNMMVTNNTFTLKGGAPTK

SEQ ID NO: 16430 - protein, 25 aa, synthetic construct
  REGION 1..25: note = Description of Artificial Sequence: Synthetic peptide
EKYCALAPNMMVTNNTFTLKGGAPT

SEQ ID NO: 16431 - protein, 25 aa, synthetic construct
  REGION 1..25: note = Description of Artificial Sequence: Synthetic peptide
TEKYCALAPNMMVTNNTFTLKGGAP

SEQ ID NO: 16432 - protein, 25 aa, synthetic construct
  REGION 1..25: note = Description of Artificial Sequence: Synthetic peptide
YCALAPNMMVTNNTFTLKGGAPTKV

SEQ ID NO: 16433 - protein, 25 aa, synthetic construct
  REGION 1..25: note = Description of Artificial Sequence: Synthetic peptide
QRKLEKMADQAMTQMYKQARSEDKR

SEQ ID NO: 16434 - protein, 25 aa, synthetic construct
  REGION 1..25: note = Description of Artificial Sequence: Synthetic peptide
MQRKLEKMADQAMTQMYKQARSEDK

SEQ ID NO: 16435 - protein, 25 aa, synthetic construct
  REGION 1..25: note = Description of Artificial Sequence: Synthetic peptide
GQIVTCAKEIKESVQTFFKLVNKFL

SEQ ID NO: 16436 - protein, 25 aa, synthetic construct
  REGION 1..25: note = Description of Artificial Sequence: Synthetic peptide
NPKGFCDLKGKYVQIPTTCANDPVG

SEQ ID NO: 16437 - protein, 25 aa, synthetic construct
  REGION 1..25: note = Description of Artificial Sequence: Synthetic peptide
DGSIIQFPNTYLEGSVRVVTTFDSE

SEQ ID NO: 16438 - protein, 25 aa, synthetic construct
  REGION 1..25: note = Description of Artificial Sequence: Synthetic peptide
QPQLEMELTPVVQTIEVNSFSGYLK

SEQ ID NO: 16439 - protein, 25 aa, synthetic construct
  REGION 1..25: note = Description of Artificial Sequence: Synthetic peptide
QLEMELTPVVQTIEVNSFSGYLKLT

SEQ ID NO: 16440 - protein, 25 aa, synthetic construct
  REGION 1..25: note = Description of Artificial Sequence: Synthetic peptide
LEMELTPVVQTIEVNSFSGYLKLTD

SEQ ID NO: 16441 - protein, 25 aa, synthetic construct
  REGION 1..25: note = Description of Artificial Sequence: Synthetic peptide
PQLEMELTPVVQTIEVNSFSGYLKL

SEQ ID NO: 16442 - protein, 25 aa, synthetic construct
  REGION 1..25: note = Description of Artificial Sequence: Synthetic peptide
DGARRVWTLMNVLTLVYKVYYGNAL

SEQ ID NO: 16443 - protein, 25 aa, synthetic construct
  REGION 1..25: note = Description of Artificial Sequence: Synthetic peptide
GPEHSLAEYHNESGLKTILRKGGRT

SEQ ID NO: 16444 - protein, 25 aa, synthetic construct
  REGION 1..25: note = Description of Artificial Sequence: Synthetic peptide
SLAEYHNESGLKTILRKGGRTIAFG

SEQ ID NO: 16445 - protein, 25 aa, synthetic construct
  REGION 1..25: note = Description of Artificial Sequence: Synthetic peptide
PEHSLAEYHNESGLKTILRKGGRTI

SEQ ID NO: 16446 - protein, 25 aa, synthetic construct
  REGION 1..25: note = Description of Artificial Sequence: Synthetic peptide
EHSLAEYHNESGLKTILRKGGRTIA

SEQ ID NO: 16447 - protein, 25 aa, synthetic construct
  REGION 1..25: note = Description of Artificial Sequence: Synthetic peptide
HSLAEYHNESGLKTILRKGGRTIAF

SEQ ID NO: 16448 - protein, 25 aa, synthetic construct
  REGION 1..25: note = Description of Artificial Sequence: Synthetic peptide
RSDVLLPLTQYNRYLALYNKYKYFS

SEQ ID NO: 16449 - protein, 25 aa, synthetic construct
  REGION 1..25: note = Description of Artificial Sequence: Synthetic peptide
ASFYYVWKSYVHVVDGCNSSTCMMC

SEQ ID NO: 16450 - protein, 25 aa, synthetic construct
  REGION 1..25: note = Description of Artificial Sequence: Synthetic peptide
RSIFSRTLETAQNSVRVLQKAAITI

SEQ ID NO: 16451 - protein, 25 aa, synthetic construct
  REGION 1..25: note = Description of Artificial Sequence: Synthetic peptide
SIFSRTLETAQNSVRVLQKAAITIL

SEQ ID NO: 16452 - protein, 25 aa, synthetic construct
  REGION 1..25: note = Description of Artificial Sequence: Synthetic peptide
SIIQFPNTYLEGSVRVVTTFDSEYC

SEQ ID NO: 16453 - protein, 25 aa, synthetic construct
  REGION 1..25: note = Description of Artificial Sequence: Synthetic peptide
DSCKRVLNVVCKTCGQQQTTLKGVE

SEQ ID NO: 16454 - protein, 25 aa, synthetic construct
  REGION 1..25: note = Description of Artificial Sequence: Synthetic peptide
TEAFEKMVSLLSVLLSMQGAVDINK

SEQ ID NO: 16455 - protein, 25 aa, synthetic construct
  REGION 1..25: note = Description of Artificial Sequence: Synthetic peptide
PSIISNEKQEILGTVSWNLREMLAH

SEQ ID NO: 16456 - protein, 25 aa, synthetic construct
  REGION 1..25: note = Description of Artificial Sequence: Synthetic peptide
ETVKGLDYKAFKQIVESCGNFKVTK

SEQ ID NO: 16457 - protein, 25 aa, synthetic construct
  REGION 1..25: note = Description of Artificial Sequence: Synthetic peptide
TVKGLDYKAFKQIVESCGNFKVTKG

SEQ ID NO: 16458 - protein, 25 aa, synthetic construct
  REGION 1..25: note = Description of Artificial Sequence: Synthetic peptide
QHLKDGTCGLVEVEKGVLPQLEQPY

SEQ ID NO: 16459 - protein, 25 aa, synthetic construct
  REGION 1..25: note = Description of Artificial Sequence: Synthetic peptide
LKDGTCGLVEVEKGVLPQLEQPYVF

SEQ ID NO: 16460 - protein, 25 aa, synthetic construct
  REGION 1..25: note = Description of Artificial Sequence: Synthetic peptide
HLKDGTCGLVEVEKGVLPQLEQPYV

SEQ ID NO: 16461 - protein, 25 aa, synthetic construct
  REGION 1..25: note = Description of Artificial Sequence: Synthetic peptide
TVYEKLKPVLDWLEEKFKEGVEFLR

SEQ ID NO: 16462 - protein, 25 aa, synthetic construct
  REGION 1..25: note = Description of Artificial Sequence: Synthetic peptide
IANYAKPFLNKVVSTTTNIVTRCLN

SEQ ID NO: 16463 - protein, 25 aa, synthetic construct
  REGION 1..25: note = Description of Artificial Sequence: Synthetic peptide
KPFLNKVVSTTTNIVTRCLNRVCTN

SEQ ID NO: 16464 - protein, 25 aa, synthetic construct
  REGION 1..25: note = Description of Artificial Sequence: Synthetic peptide
GTVYEKLKPVLDWLEEKFKEGVEFL

SEQ ID NO: 16465 - protein, 25 aa, synthetic construct
  REGION 1..25: note = Description of Artificial Sequence: Synthetic peptide
NRATLQAIASEFSSLPSYAAFATAQ

SEQ ID NO: 16466 - protein, 25 aa, synthetic construct
  REGION 1..25: note = Description of Artificial Sequence: Synthetic peptide
AKLKALNLGETFVTHSKGLYRKCVK

SEQ ID NO: 16467 - protein, 25 aa, synthetic construct
  REGION 1..25: note = Description of Artificial Sequence: Synthetic peptide
TIKGTHHWLLLTILTSLLVLVQSTQ

SEQ ID NO: 16468 - protein, 25 aa, synthetic construct
  REGION 1..25: note = Description of Artificial Sequence: Synthetic peptide
IKGTHHWLLLTILTSLLVLVQSTQW

SEQ ID NO: 16469 - protein, 25 aa, synthetic construct
  REGION 1..25: note = Description of Artificial Sequence: Synthetic peptide
RTIKGTHHWLLLTILTSLLVLVQST

SEQ ID NO: 16470 - protein, 25 aa, synthetic construct
  REGION 1..25: note = Description of Artificial Sequence: Synthetic peptide
STTTNIVTRCLNRVCTNYMPYFFTL

SEQ ID NO: 16471 - protein, 25 aa, synthetic construct
  REGION 1..25: note = Description of Artificial Sequence: Synthetic peptide
YLAVFDKNLYDKLVSSFLEMKSEKQ

SEQ ID NO: 16472 - protein, 25 aa, synthetic construct
  REGION 1..25: note = Description of Artificial Sequence: Synthetic peptide
LAVFDKNLYDKLVSSFLEMKSEKQV

SEQ ID NO: 16473 - protein, 25 aa, synthetic construct
  REGION 1..25: note = Description of Artificial Sequence: Synthetic peptide
YFNMVYMPASWVMRIMTWLDMVDTS

SEQ ID NO: 16474 - protein, 25 aa, synthetic construct
  REGION 1..25: note = Description of Artificial Sequence: Synthetic peptide
NVNKGEDIQLLKSAYENFNQHEVLL

SEQ ID NO: 16475 - protein, 25 aa, synthetic construct
  REGION 1..25: note = Description of Artificial Sequence: Synthetic peptide
VNKGEDIQLLKSAYENFNQHEVLLA

SEQ ID NO: 16476 - protein, 25 aa, synthetic construct
  REGION 1..25: note = Description of Artificial Sequence: Synthetic peptide
PNVNKGEDIQLLKSAYENFNQHEVL

SEQ ID NO: 16477 - protein, 25 aa, synthetic construct
  REGION 1..25: note = Description of Artificial Sequence: Synthetic peptide
GPNVNKGEDIQLLKSAYENFNQHEV

SEQ ID NO: 16478 - protein, 25 aa, synthetic construct
  REGION 1..25: note = Description of Artificial Sequence: Synthetic peptide
GETFVTHSKGLYRKCVKSREETGLL

SEQ ID NO: 16479 - protein, 25 aa, synthetic construct
  REGION 1..25: note = Description of Artificial Sequence: Synthetic peptide
KMSDVKCTSVVLLSVLQQLRVESSS

SEQ ID NO: 16480 - protein, 25 aa, synthetic construct
  REGION 1..25: note = Description of Artificial Sequence: Synthetic peptide
WLMWLIINLVQMAPISAMVRMYIFF

SEQ ID NO: 16481 - protein, 25 aa, synthetic construct
  REGION 1..25: note = Description of Artificial Sequence: Synthetic peptide
LMWLIINLVQMAPISAMVRMYIFFA

SEQ ID NO: 16482 - protein, 25 aa, synthetic construct
  REGION 1..25: note = Description of Artificial Sequence: Synthetic peptide
AMQTMLFTMLRKLDNDALNNIINNA

SEQ ID NO: 16483 - protein, 25 aa, synthetic construct
  REGION 1..25: note = Description of Artificial Sequence: Synthetic peptide
SFLGRYMSALNHTKKWKYPQVNGLT

SEQ ID NO: 16484 - protein, 25 aa, synthetic construct
  REGION 1..25: note = Description of Artificial Sequence: Synthetic peptide
APISAMVRMYIFFASFYYVWKSYVH

SEQ ID NO: 16485 - protein, 25 aa, synthetic construct
  REGION 1..25: note = Description of Artificial Sequence: Synthetic peptide
MLCTHTGTGQAITVTPEANMDQESF

SEQ ID NO: 16486 - protein, 25 aa, synthetic construct
  REGION 1..25: note = Description of Artificial Sequence: Synthetic peptide
THTGTGQAITVTPEANMDQESFGGA

SEQ ID NO: 16487 - protein, 25 aa, synthetic construct
  REGION 1..25: note = Description of Artificial Sequence: Synthetic peptide
HTGTGQAITVTPEANMDQESFGGAS

SEQ ID NO: 16488 - protein, 25 aa, synthetic construct
  REGION 1..25: note = Description of Artificial Sequence: Synthetic peptide
LCTHTGTGQAITVTPEANMDQESFG

SEQ ID NO: 16489 - protein, 25 aa, synthetic construct
  REGION 1..25: note = Description of Artificial Sequence: Synthetic peptide
CTHTGTGQAITVTPEANMDQESFGG

SEQ ID NO: 16490 - protein, 25 aa, synthetic construct
  REGION 1..25: note = Description of Artificial Sequence: Synthetic peptide
SDVKCTSVVLLSVLQQLRVESSSKL

SEQ ID NO: 16491 - protein, 25 aa, synthetic construct
  REGION 1..25: note = Description of Artificial Sequence: Synthetic peptide
MPASWVMRIMTWLDMVDTSLSGFKL

SEQ ID NO: 16492 - protein, 25 aa, synthetic construct
  REGION 1..25: note = Description of Artificial Sequence: Synthetic peptide
EQLDFIDTKRGVYCCREHEHEIAWY

SEQ ID NO: 16493 - protein, 25 aa, synthetic construct
  REGION 1..25: note = Description of Artificial Sequence: Synthetic peptide
SEQLDFIDTKRGVYCCREHEHEIAW

SEQ ID NO: 16494 - protein, 25 aa, synthetic construct
  REGION 1..25: note = Description of Artificial Sequence: Synthetic peptide
VLKTGDLQPLEQPTSEAVEAPLVGT

SEQ ID NO: 16495 - protein, 25 aa, synthetic construct
  REGION 1..25: note = Description of Artificial Sequence: Synthetic peptide
KTGDLQPLEQPTSEAVEAPLVGTPV

SEQ ID NO: 16496 - protein, 25 aa, synthetic construct
  REGION 1..25: note = Description of Artificial Sequence: Synthetic peptide
EVVLKTGDLQPLEQPTSEAVEAPLV

SEQ ID NO: 16497 - protein, 25 aa, synthetic construct
  REGION 1..25: note = Description of Artificial Sequence: Synthetic peptide
LKTGDLQPLEQPTSEAVEAPLVGTP

SEQ ID NO: 16498 - protein, 25 aa, synthetic construct
  REGION 1..25: note = Description of Artificial Sequence: Synthetic peptide
VVLKTGDLQPLEQPTSEAVEAPLVG

SEQ ID NO: 16499 - protein, 25 aa, synthetic construct
  REGION 1..25: note = Description of Artificial Sequence: Synthetic peptide
GGQPITNCVKMLCTHTGTGQAITVT

SEQ ID NO: 16500 - protein, 25 aa, synthetic construct
  REGION 1..25: note = Description of Artificial Sequence: Synthetic peptide
EDMLNPNYEDLLIRKSNHNFLVQAG

SEQ ID NO: 16501 - protein, 25 aa, synthetic construct
  REGION 1..25: note = Description of Artificial Sequence: Synthetic peptide
KNTVKSVGKFCLEASFNYLKSPNFS

SEQ ID NO: 16502 - protein, 25 aa, synthetic construct
  REGION 1..25: note = Description of Artificial Sequence: Synthetic peptide
TLETAQNSVRVLQKAAITILDGISQ

SEQ ID NO: 16503 - protein, 25 aa, synthetic construct
  REGION 1..25: note = Description of Artificial Sequence: Synthetic peptide
LETAQNSVRVLQKAAITILDGISQY

SEQ ID NO: 16504 - protein, 25 aa, synthetic construct
  REGION 1..25: note = Description of Artificial Sequence: Synthetic peptide
TEVLTEEVVLKTGDLQPLEQPTSEA

SEQ ID NO: 16505 - protein, 25 aa, synthetic construct
  REGION 1..25: note = Description of Artificial Sequence: Synthetic peptide
EVLTEEVVLKTGDLQPLEQPTSEAV

SEQ ID NO: 16506 - protein, 25 aa, synthetic construct
  REGION 1..25: note = Description of Artificial Sequence: Synthetic peptide
KASCTLSEQLDFIDTKRGVYCCREH

SEQ ID NO: 16507 - protein, 25 aa, synthetic construct
  REGION 1..25: note = Description of Artificial Sequence: Synthetic peptide
ASCTLSEQLDFIDTKRGVYCCREHE

SEQ ID NO: 16508 - protein, 25 aa, synthetic construct
  REGION 1..25: note = Description of Artificial Sequence: Synthetic peptide
EEAKKVKPTVVVNAANVYLKHGGGV

SEQ ID NO: 16509 - protein, 25 aa, synthetic construct
  REGION 1..25: note = Description of Artificial Sequence: Synthetic peptide
EAKKVKPTVVVNAANVYLKHGGGVA

SEQ ID NO: 16510 - protein, 25 aa, synthetic construct
  REGION 1..25: note = Description of Artificial Sequence: Synthetic peptide
VEEAKKVKPTVVVNAANVYLKHGGG

SEQ ID NO: 16511 - protein, 25 aa, synthetic construct
  REGION 1..25: note = Description of Artificial Sequence: Synthetic peptide
VYEKLKPVLDWLEEKFKEGVEFLRD

SEQ ID NO: 16512 - protein, 25 aa, synthetic construct
  REGION 1..25: note = Description of Artificial Sequence: Synthetic peptide
GNALDQAISMWALIISVTSNYSGVV

SEQ ID NO: 16513 - protein, 25 aa, synthetic construct
  REGION 1..25: note = Description of Artificial Sequence: Synthetic peptide
NALDQAISMWALIISVTSNYSGVVT

SEQ ID NO: 16514 - protein, 25 aa, synthetic construct
  REGION 1..25: note = Description of Artificial Sequence: Synthetic peptide
KPTVVVNAANVYLKHGGGVAGALNK

SEQ ID NO: 16515 - protein, 25 aa, synthetic construct
  REGION 1..25: note = Description of Artificial Sequence: Synthetic peptide
VLDMCASLKELLQNGMNGRTILGSA

SEQ ID NO: 16516 - protein, 25 aa, synthetic construct
  REGION 1..25: note = Description of Artificial Sequence: Synthetic peptide
AYYNTTKGGRFVLALLSDLQDLKWA

SEQ ID NO: 16517 - protein, 25 aa, synthetic construct
  REGION 1..25: note = Description of Artificial Sequence: Synthetic peptide
KGGRFVLALLSDLQDLKWARFPKSD

SEQ ID NO: 16518 - protein, 25 aa, synthetic construct
  REGION 1..25: note = Description of Artificial Sequence: Synthetic peptide
SAMVRMYIFFASFYYVWKSYVHVVD

SEQ ID NO: 16519 - protein, 25 aa, synthetic construct
  REGION 1..25: note = Description of Artificial Sequence: Synthetic peptide
IAVLDMCASLKELLQNGMNGRTILG

SEQ ID NO: 16520 - protein, 25 aa, synthetic construct
  REGION 1..25: note = Description of Artificial Sequence: Synthetic peptide
GIAVLDMCASLKELLQNGMNGRTIL

SEQ ID NO: 16521 - protein, 25 aa, synthetic construct
  REGION 1..25: note = Description of Artificial Sequence: Synthetic peptide
VQTIEVNSFSGYLKLTDNVYIKNAD

SEQ ID NO: 16522 - protein, 25 aa, synthetic construct
  REGION 1..25: note = Description of Artificial Sequence: Synthetic peptide
VDLPIGINITRFQTLLALHRSYLTP

SEQ ID NO: 16523 - protein, 25 aa, synthetic construct
  REGION 1..25: note = Description of Artificial Sequence: Synthetic peptide
LPIGINITRFQTLLALHRSYLTPGD

SEQ ID NO: 16524 - protein, 25 aa, synthetic construct
  REGION 1..25: note = Description of Artificial Sequence: Synthetic peptide
DLPIGINITRFQTLLALHRSYLTPG

SEQ ID NO: 16525 - protein, 25 aa, synthetic construct
  REGION 1..25: note = Description of Artificial Sequence: Synthetic peptide
VCSVIDLLLDDFVEIIKSQDLSVVS

SEQ ID NO: 16526 - protein, 25 aa, synthetic construct
  REGION 1..25: note = Description of Artificial Sequence: Synthetic peptide
LSFKELLVYAADPAMHAASGNLLLD

SEQ ID NO: 16527 - protein, 25 aa, synthetic construct
  REGION 1..25: note = Description of Artificial Sequence: Synthetic peptide
SRLSFKELLVYAADPAMHAASGNLL

SEQ ID NO: 16528 - protein, 25 aa, synthetic construct
  REGION 1..25: note = Description of Artificial Sequence: Synthetic peptide
RLSFKELLVYAADPAMHAASGNLLL

SEQ ID NO: 16529 - protein, 25 aa, synthetic construct
  REGION 1..25: note = Description of Artificial Sequence: Synthetic peptide
CPAEIVDTVSALVYDNKLKAHKDKS

SEQ ID NO: 16530 - protein, 25 aa, synthetic construct
  REGION 1..25: note = Description of Artificial Sequence: Synthetic peptide
DFGGFNFSQILPDPSKPSKRSFIED

SEQ ID NO: 16531 - protein, 25 aa, synthetic construct
  REGION 1..25: note = Description of Artificial Sequence: Synthetic peptide
KDFGGFNFSQILPDPSKPSKRSFIE

SEQ ID NO: 16532 - protein, 25 aa, synthetic construct
  REGION 1..25: note = Description of Artificial Sequence: Synthetic peptide
FGGFNFSQILPDPSKPSKRSFIEDL

SEQ ID NO: 16533 - protein, 25 aa, synthetic construct
  REGION 1..25: note = Description of Artificial Sequence: Synthetic peptide
LEIPRRNVATLQAENVTGLFKDCSK

SEQ ID NO: 16534 - protein, 25 aa, synthetic construct
  REGION 1..25: note = Description of Artificial Sequence: Synthetic peptide
IDLLLDDFVEIIKSQDLSVVSKVVK

SEQ ID NO: 16535 - protein, 25 aa, synthetic construct
  REGION 1..25: note = Description of Artificial Sequence: Synthetic peptide
SVIDLLLDDFVEIIKSQDLSVVSKV

SEQ ID NO: 16536 - protein, 25 aa, synthetic construct
  REGION 1..25: note = Description of Artificial Sequence: Synthetic peptide
VIDLLLDDFVEIIKSQDLSVVSKVV

SEQ ID NO: 16537 - protein, 25 aa, synthetic construct
  REGION 1..25: note = Description of Artificial Sequence: Synthetic peptide
YKQFDTYNLWNTFTRLQSLENVAFN

SEQ ID NO: 16538 - protein, 25 aa, synthetic construct
  REGION 1..25: note = Description of Artificial Sequence: Synthetic peptide
DTYNLWNTFTRLQSLENVAFNVVNK

SEQ ID NO: 16539 - protein, 25 aa, synthetic construct
  REGION 1..25: note = Description of Artificial Sequence: Synthetic peptide
DLPKEITVATSRTLSYYKLGASQRV

SEQ ID NO: 16540 - protein, 25 aa, synthetic construct
  REGION 1..25: note = Description of Artificial Sequence: Synthetic peptide
MADSNGTITVEELKKLLEQWNLVIG

SEQ ID NO: 16541 - protein, 25 aa, synthetic construct
  REGION 1..25: note = Description of Artificial Sequence: Synthetic peptide
IGINITRFQTLLALHRSYLTPGDSS

SEQ ID NO: 16542 - protein, 25 aa, synthetic construct
  REGION 1..25: note = Description of Artificial Sequence: Synthetic peptide
GINITRFQTLLALHRSYLTPGDSSS

SEQ ID NO: 16543 - protein, 25 aa, synthetic construct
  REGION 1..25: note = Description of Artificial Sequence: Synthetic peptide
YPSARIVYTACSHAAVDALCEKALK

SEQ ID NO: 16544 - protein, 25 aa, synthetic construct
  REGION 1..25: note = Description of Artificial Sequence: Synthetic peptide
AMPNMLRIMASLVLARKHTTCCSLS

SEQ ID NO: 16545 - protein, 25 aa, synthetic construct
  REGION 1..25: note = Description of Artificial Sequence: Synthetic peptide
GIPKDMTYRRLISMMGFKMNYQVNG

SEQ ID NO: 16546 - protein, 25 aa, synthetic construct
  REGION 1..25: note = Description of Artificial Sequence: Synthetic peptide
PGIPKDMTYRRLISMMGFKMNYQVN

SEQ ID NO: 16547 - protein, 25 aa, synthetic construct
  REGION 1..25: note = Description of Artificial Sequence: Synthetic peptide
ALLAVFQSASKIITLKKRWQLALSK

SEQ ID NO: 16548 - protein, 25 aa, synthetic construct
  REGION 1..25: note = Description of Artificial Sequence: Synthetic peptide
LLAVFQSASKIITLKKRWQLALSKG

SEQ ID NO: 16549 - protein, 25 aa, synthetic construct
  REGION 1..25: note = Description of Artificial Sequence: Synthetic peptide
VALLAVFQSASKIITLKKRWQLALS

SEQ ID NO: 16550 - protein, 25 aa, synthetic construct
  REGION 1..25: note = Description of Artificial Sequence: Synthetic peptide
PPLNRNYVFTGYRVTKNSKVQIGEY

SEQ ID NO: 16551 - protein, 25 aa, synthetic construct
  REGION 1..25: note = Description of Artificial Sequence: Synthetic peptide
RPPLNRNYVFTGYRVTKNSKVQIGE

SEQ ID NO: 16552 - protein, 25 aa, synthetic construct
  REGION 1..25: note = Description of Artificial Sequence: Synthetic peptide
PIGINITRFQTLLALHRSYLTPGDS

SEQ ID NO: 16553 - protein, 25 aa, synthetic construct
  REGION 1..25: note = Description of Artificial Sequence: Synthetic peptide
AVMYMGTLSYEQFKKGVQIPCTCGK

SEQ ID NO: 16554 - protein, 25 aa, synthetic construct
  REGION 1..25: note = Description of Artificial Sequence: Synthetic peptide
KHGTFTCASEYTGNYQCGHYKHITS

SEQ ID NO: 16555 - protein, 25 aa, synthetic construct
  REGION 1..25: note = Description of Artificial Sequence: Synthetic peptide
HGTFTCASEYTGNYQCGHYKHITSK

SEQ ID NO: 16556 - protein, 25 aa, synthetic construct
  REGION 1..25: note = Description of Artificial Sequence: Synthetic peptide
ICYTPSKLIEYTDFATSACVLAAEC

SEQ ID NO: 16557 - protein, 25 aa, synthetic construct
  REGION 1..25: note = Description of Artificial Sequence: Synthetic peptide
TPSKLIEYTDFATSACVLAAECTIF

SEQ ID NO: 16558 - protein, 25 aa, synthetic construct
  REGION 1..25: note = Description of Artificial Sequence: Synthetic peptide
SAVGNICYTPSKLIEYTDFATSACV

SEQ ID NO: 16559 - protein, 25 aa, synthetic construct
  REGION 1..25: note = Description of Artificial Sequence: Synthetic peptide
PPIKDFGGFNFSQILPDPSKPSKRS

SEQ ID NO: 16560 - protein, 25 aa, synthetic construct
  REGION 1..25: note = Description of Artificial Sequence: Synthetic peptide
FSAVGNICYTPSKLIEYTDFATSAC

SEQ ID NO: 16561 - protein, 25 aa, synthetic construct
  REGION 1..25: note = Description of Artificial Sequence: Synthetic peptide
RVFSAVGNICYTPSKLIEYTDFATS

SEQ ID NO: 16562 - protein, 25 aa, synthetic construct
  REGION 1..25: note = Description of Artificial Sequence: Synthetic peptide
VFSAVGNICYTPSKLIEYTDFATSA

SEQ ID NO: 16563 - protein, 25 aa, synthetic construct
  REGION 1..25: note = Description of Artificial Sequence: Synthetic peptide
VGDYFVLTSHTVMPLSAPTLVPQEH

SEQ ID NO: 16564 - protein, 25 aa, synthetic construct
  REGION 1..25: note = Description of Artificial Sequence: Synthetic peptide
LAWPLIVTALRANSAVKLQNNELSP

SEQ ID NO: 16565 - protein, 25 aa, synthetic construct
  REGION 1..25: note = Description of Artificial Sequence: Synthetic peptide
VPANSTVLSFCAFAVDAAKAYKDYL

SEQ ID NO: 16566 - protein, 25 aa, synthetic construct
  REGION 1..25: note = Description of Artificial Sequence: Synthetic peptide
KSILSPLYAFASEAARVVRSIFSRT

SEQ ID NO: 16567 - protein, 25 aa, synthetic construct
  REGION 1..25: note = Description of Artificial Sequence: Synthetic peptide
QKSILSPLYAFASEAARVVRSIFSR

SEQ ID NO: 16568 - protein, 25 aa, synthetic construct
  REGION 1..25: note = Description of Artificial Sequence: Synthetic peptide
IPLTTAAKLMVVIPDYNTYKNTCDG

SEQ ID NO: 16569 - protein, 25 aa, synthetic construct
  REGION 1..25: note = Description of Artificial Sequence: Synthetic peptide
LSPLYAFASEAARVVRSIFSRTLET

SEQ ID NO: 16570 - protein, 25 aa, synthetic construct
  REGION 1..25: note = Description of Artificial Sequence: Synthetic peptide
ILSPLYAFASEAARVVRSIFSRTLE

SEQ ID NO: 16571 - protein, 25 aa, synthetic construct
  REGION 1..25: note = Description of Artificial Sequence: Synthetic peptide
KQFDTYNLWNTFTRLQSLENVAFNV

SEQ ID NO: 16572 - protein, 25 aa, synthetic construct
  REGION 1..25: note = Description of Artificial Sequence: Synthetic peptide
QFDTYNLWNTFTRLQSLENVAFNVV

SEQ ID NO: 16573 - protein, 25 aa, synthetic construct
  REGION 1..25: note = Description of Artificial Sequence: Synthetic peptide
FDTYNLWNTFTRLQSLENVAFNVVN

SEQ ID NO: 16574 - protein, 25 aa, synthetic construct
  REGION 1..25: note = Description of Artificial Sequence: Synthetic peptide
LPDDFTGCVIAWNSNNLDSKVGGNY

SEQ ID NO: 16575 - protein, 25 aa, synthetic construct
  REGION 1..25: note = Description of Artificial Sequence: Synthetic peptide
NYKLPDDFTGCVIAWNSNNLDSKVG

SEQ ID NO: 16576 - protein, 25 aa, synthetic construct
  REGION 1..25: note = Description of Artificial Sequence: Synthetic peptide
KLPDDFTGCVIAWNSNNLDSKVGGN

SEQ ID NO: 16577 - protein, 25 aa, synthetic construct
  REGION 1..25: note = Description of Artificial Sequence: Synthetic peptide
YKLPDDFTGCVIAWNSNNLDSKVGG

SEQ ID NO: 16578 - protein, 25 aa, synthetic construct
  REGION 1..25: note = Description of Artificial Sequence: Synthetic peptide
GRCDIKDLPKEITVATSRTLSYYKL

SEQ ID NO: 16579 - protein, 25 aa, synthetic construct
  REGION 1..25: note = Description of Artificial Sequence: Synthetic peptide
RGMVLGSLAATVRLQAGNATEVPAN

SEQ ID NO: 16580 - protein, 25 aa, synthetic construct
  REGION 1..25: note = Description of Artificial Sequence: Synthetic peptide
GMVLGSLAATVRLQAGNATEVPANS

SEQ ID NO: 16581 - protein, 25 aa, synthetic construct
  REGION 1..25: note = Description of Artificial Sequence: Synthetic peptide
TSNPTTFHLDGEVITFDNLKTLLSL

SEQ ID NO: 16582 - protein, 25 aa, synthetic construct
  REGION 1..25: note = Description of Artificial Sequence: Synthetic peptide
YTSNPTTFHLDGEVITFDNLKTLLS

SEQ ID NO: 16583 - protein, 25 aa, synthetic construct
  REGION 1..25: note = Description of Artificial Sequence: Synthetic peptide
STVLSFCAFAVDAAKAYKDYLASGG

SEQ ID NO: 16584 - protein, 25 aa, synthetic construct
  REGION 1..25: note = Description of Artificial Sequence: Synthetic peptide
FTLLLQLCTFTRSTNSRIKASMPTT

SEQ ID NO: 16585 - protein, 25 aa, synthetic construct
  REGION 1..25: note = Description of Artificial Sequence: Synthetic peptide
FFTLLLQLCTFTRSTNSRIKASMPT

SEQ ID NO: 16586 - protein, 25 aa, synthetic construct
  REGION 1..25: note = Description of Artificial Sequence: Synthetic peptide
YITTYPGQGLNGYTVEEAKTVLKKC

SEQ ID NO: 16587 - protein, 25 aa, synthetic construct
  REGION 1..25: note = Description of Artificial Sequence: Synthetic peptide
AKKNNLPFKLTCATTRQVVNVVTTK

SEQ ID NO: 16588 - protein, 25 aa, synthetic construct
  REGION 1..25: note = Description of Artificial Sequence: Synthetic peptide
KKNNLPFKLTCATTRQVVNVVTTKI

SEQ ID NO: 16589 - protein, 25 aa, synthetic construct
  REGION 1..25: note = Description of Artificial Sequence: Synthetic peptide
NGECPNFVFPLNSIIKTIQPRVEKK

SEQ ID NO: 16590 - protein, 25 aa, synthetic construct
  REGION 1..25: note = Description of Artificial Sequence: Synthetic peptide
LNVGDYFVLTSHTVMPLSAPTLVPQ

SEQ ID NO: 16591 - protein, 25 aa, synthetic construct
  REGION 1..25: note = Description of Artificial Sequence: Synthetic peptide
YDTNVLEGSVAYESLRPDTRYVLMD

SEQ ID NO: 16592 - protein, 25 aa, synthetic construct
  REGION 1..25: note = Description of Artificial Sequence: Synthetic peptide
NVGDYFVLTSHTVMPLSAPTLVPQE

SEQ ID NO: 16593 - protein, 25 aa, synthetic construct
  REGION 1..25: note = Description of Artificial Sequence: Synthetic peptide
TLLSLREVRTIKVFTTVDNINLHTQ

SEQ ID NO: 16594 - protein, 25 aa, synthetic construct
  REGION 1..25: note = Description of Artificial Sequence: Synthetic peptide
SAAKKNNLPFKLTCATTRQVVNVVT

SEQ ID NO: 16595 - protein, 25 aa, synthetic construct
  REGION 1..25: note = Description of Artificial Sequence: Synthetic peptide
AAKKNNLPFKLTCATTRQVVNVVTT

SEQ ID NO: 16596 - protein, 25 aa, synthetic construct
  REGION 1..25: note = Description of Artificial Sequence: Synthetic peptide
MPYFFTLLLQLCTFTRSTNSRIKAS

SEQ ID NO: 16597 - protein, 25 aa, synthetic construct
  REGION 1..25: note = Description of Artificial Sequence: Synthetic peptide
NYMPYFFTLLLQLCTFTRSTNSRIK

SEQ ID NO: 16598 - protein, 25 aa, synthetic construct
  REGION 1..25: note = Description of Artificial Sequence: Synthetic peptide
YMPYFFTLLLQLCTFTRSTNSRIKA

SEQ ID NO: 16599 - protein, 25 aa, synthetic construct
  REGION 1..25: note = Description of Artificial Sequence: Synthetic peptide
EEIAIILASFSASTSAFVETVKGLD

SEQ ID NO: 16600 - protein, 25 aa, synthetic construct
  REGION 1..25: note = Description of Artificial Sequence: Synthetic peptide
LNEEIAIILASFSASTSAFVETVKG

SEQ ID NO: 16601 - protein, 25 aa, synthetic construct
  REGION 1..25: note = Description of Artificial Sequence: Synthetic peptide
EIAIILASFSASTSAFVETVKGLDY

SEQ ID NO: 16602 - protein, 25 aa, synthetic construct
  REGION 1..25: note = Description of Artificial Sequence: Synthetic peptide
NEEIAIILASFSASTSAFVETVKGL

SEQ ID NO: 16603 - protein, 25 aa, synthetic construct
  REGION 1..25: note = Description of Artificial Sequence: Synthetic peptide
GCVPLNIIPLTTAAKLMVVIPDYNT

SEQ ID NO: 16604 - protein, 25 aa, synthetic construct
  REGION 1..25: note = Description of Artificial Sequence: Synthetic peptide
LPSYAAFATAQEAYEQAVANGDSEV

SEQ ID NO: 16605 - protein, 25 aa, synthetic construct
  REGION 1..25: note = Description of Artificial Sequence: Synthetic peptide
DNVLSTFISAARQGFVDSDVETKDV

SEQ ID NO: 16606 - protein, 25 aa, synthetic construct
  REGION 1..25: note = Description of Artificial Sequence: Synthetic peptide
AKALRKVPTDNYITTYPGQGLNGYT

SEQ ID NO: 16607 - protein, 25 aa, synthetic construct
  REGION 1..25: note = Description of Artificial Sequence: Synthetic peptide
FKLVNKFLALCADSIIIGGAKLKAL

SEQ ID NO: 16608 - protein, 25 aa, synthetic construct
  REGION 1..25: note = Description of Artificial Sequence: Synthetic peptide
TFFKLVNKFLALCADSIIIGGAKLK

SEQ ID NO: 16609 - protein, 25 aa, synthetic construct
  REGION 1..25: note = Description of Artificial Sequence: Synthetic peptide
FFKLVNKFLALCADSIIIGGAKLKA

SEQ ID NO: 16610 - protein, 25 aa, synthetic construct
  REGION 1..25: note = Description of Artificial Sequence: Synthetic peptide
DVVRQCSGVTFQSAVKRTIKGTHHW

SEQ ID NO: 16611 - protein, 25 aa, synthetic construct
  REGION 1..25: note = Description of Artificial Sequence: Synthetic peptide
CVMYASAVVLLILMTARTVYDDGAR

SEQ ID NO: 16612 - protein, 25 aa, synthetic construct
  REGION 1..25: note = Description of Artificial Sequence: Synthetic peptide
AAKAYKDYLASGGQPITNCVKMLCT

SEQ ID NO: 16613 - protein, 25 aa, synthetic construct
  REGION 1..25: note = Description of Artificial Sequence: Synthetic peptide
VLLPLTQYNRYLALYNKYKYFSGAM

SEQ ID NO: 16614 - protein, 25 aa, synthetic construct
  REGION 1..25: note = Description of Artificial Sequence: Synthetic peptide
DVLLPLTQYNRYLALYNKYKYFSGA

SEQ ID NO: 16615 - protein, 25 aa, synthetic construct
  REGION 1..25: note = Description of Artificial Sequence: Synthetic peptide
LLPLTQYNRYLALYNKYKYFSGAMD

SEQ ID NO: 16616 - protein, 25 aa, synthetic construct
  REGION 1..25: note = Description of Artificial Sequence: Synthetic peptide
LPLTQYNRYLALYNKYKYFSGAMDT

SEQ ID NO: 16617 - protein, 25 aa, synthetic construct
  REGION 1..25: note = Description of Artificial Sequence: Synthetic peptide
DNLKTLLSLREVRTIKVFTTVDNIN

SEQ ID NO: 16618 - protein, 25 aa, synthetic construct
  REGION 1..25: note = Description of Artificial Sequence: Synthetic peptide
GDFLHFLPRVFSAVGNICYTPSKLI

SEQ ID NO: 16619 - protein, 25 aa, synthetic construct
  REGION 1..25: note = Description of Artificial Sequence: Synthetic peptide
CPNFVFPLNSIIKTIQPRVEKKKLD

SEQ ID NO: 16620 - protein, 25 aa, synthetic construct
  REGION 1..25: note = Description of Artificial Sequence: Synthetic peptide
VDTANPKTPKYKFVRIQPGQTFSVL

SEQ ID NO: 16621 - protein, 25 aa, synthetic construct
  REGION 1..25: note = Description of Artificial Sequence: Synthetic peptide
KVDTANPKTPKYKFVRIQPGQTFSV

SEQ ID NO: 16622 - protein, 25 aa, synthetic construct
  REGION 1..25: note = Description of Artificial Sequence: Synthetic peptide
VEQRKQDDKKIKACVEEVTTTLEET

SEQ ID NO: 16623 - protein, 25 aa, synthetic construct
  REGION 1..25: note = Description of Artificial Sequence: Synthetic peptide
SVEQRKQDDKKIKACVEEVTTTLEE

SEQ ID NO: 16624 - protein, 25 aa, synthetic construct
  REGION 1..25: note = Description of Artificial Sequence: Synthetic peptide
NVLEGSVAYESLRPDTRYVLMDGSI

SEQ ID NO: 16625 - protein, 25 aa, synthetic construct
  REGION 1..25: note = Description of Artificial Sequence: Synthetic peptide
FEYYHTTDPSFLGRYMSALNHTKKW

SEQ ID NO: 16626 - protein, 25 aa, synthetic construct
  REGION 1..25: note = Description of Artificial Sequence: Synthetic peptide
ASTSAFVETVKGLDYKAFKQIVESC

SEQ ID NO: 16627 - protein, 25 aa, synthetic construct
  REGION 1..25: note = Description of Artificial Sequence: Synthetic peptide
CDNIKFADDLNQLTGYKKPASRELK

SEQ ID NO: 16628 - protein, 25 aa, synthetic construct
  REGION 1..25: note = Description of Artificial Sequence: Synthetic peptide
ELAKNVSLDNVLSTFISAARQGFVD

SEQ ID NO: 16629 - protein, 25 aa, synthetic construct
  REGION 1..25: note = Description of Artificial Sequence: Synthetic peptide
LTSSSKTPEEHFIETISLAGSYKDW

SEQ ID NO: 16630 - protein, 25 aa, synthetic construct
  REGION 1..25: note = Description of Artificial Sequence: Synthetic peptide
CALAPNMMVTNNTFTLKGGAPTKVT

SEQ ID NO: 16631 - protein, 25 aa, synthetic construct
  REGION 1..25: note = Description of Artificial Sequence: Synthetic peptide
LAPNMMVTNNTFTLKGGAPTKVTFG

SEQ ID NO: 16632 - protein, 25 aa, synthetic construct
  REGION 1..25: note = Description of Artificial Sequence: Synthetic peptide
ALAPNMMVTNNTFTLKGGAPTKVTF

SEQ ID NO: 16633 - protein, 25 aa, synthetic construct
  REGION 1..25: note = Description of Artificial Sequence: Synthetic peptide
IKFADDLNQLTGYKKPASRELKVTF

SEQ ID NO: 16634 - protein, 25 aa, synthetic construct
  REGION 1..25: note = Description of Artificial Sequence: Synthetic peptide
FADDLNQLTGYKKPASRELKVTFFP

SEQ ID NO: 16635 - protein, 25 aa, synthetic construct
  REGION 1..25: note = Description of Artificial Sequence: Synthetic peptide
NIKFADDLNQLTGYKKPASRELKVT

SEQ ID NO: 16636 - protein, 25 aa, synthetic construct
  REGION 1..25: note = Description of Artificial Sequence: Synthetic peptide
KFADDLNQLTGYKKPASRELKVTFF

SEQ ID NO: 16637 - protein, 25 aa, synthetic construct
  REGION 1..25: note = Description of Artificial Sequence: Synthetic peptide
PNYEDLLIRKSNHNFLVQAGNVQLR

SEQ ID NO: 16638 - protein, 25 aa, synthetic construct
  REGION 1..25: note = Description of Artificial Sequence: Synthetic peptide
NSPNLAWPLIVTALRANSAVKLQNN

SEQ ID NO: 16639 - protein, 25 aa, synthetic construct
  REGION 1..25: note = Description of Artificial Sequence: Synthetic peptide
DNSPNLAWPLIVTALRANSAVKLQN

SEQ ID NO: 16640 - protein, 25 aa, synthetic construct
  REGION 1..25: note = Description of Artificial Sequence: Synthetic peptide
QDDKKIKACVEEVTTTLEETKFLTE

SEQ ID NO: 16641 - protein, 25 aa, synthetic construct
  REGION 1..25: note = Description of Artificial Sequence: Synthetic peptide
DDKKIKACVEEVTTTLEETKFLTEN

SEQ ID NO: 16642 - protein, 25 aa, synthetic construct
  REGION 1..25: note = Description of Artificial Sequence: Synthetic peptide
SASIVAGGIVAIVVTCLAYYFMRFR

SEQ ID NO: 16643 - protein, 25 aa, synthetic construct
  REGION 1..25: note = Description of Artificial Sequence: Synthetic peptide
SIVAGGIVAIVVTCLAYYFMRFRRA

SEQ ID NO: 16644 - protein, 25 aa, synthetic construct
  REGION 1..25: note = Description of Artificial Sequence: Synthetic peptide
IVAGGIVAIVVTCLAYYFMRFRRAF

SEQ ID NO: 16645 - protein, 25 aa, synthetic construct
  REGION 1..25: note = Description of Artificial Sequence: Synthetic peptide
ASIVAGGIVAIVVTCLAYYFMRFRR

SEQ ID NO: 16646 - protein, 25 aa, synthetic construct
  REGION 1..25: note = Description of Artificial Sequence: Synthetic peptide
FACVVADAVIKTLQPVSELLTPLGI

SEQ ID NO: 16647 - protein, 25 aa, synthetic construct
  REGION 1..25: note = Description of Artificial Sequence: Synthetic peptide
VVADAVIKTLQPVSELLTPLGIDLD

SEQ ID NO: 16648 - protein, 25 aa, synthetic construct
  REGION 1..25: note = Description of Artificial Sequence: Synthetic peptide
ACVVADAVIKTLQPVSELLTPLGID

SEQ ID NO: 16649 - protein, 25 aa, synthetic construct
  REGION 1..25: note = Description of Artificial Sequence: Synthetic peptide
EFACVVADAVIKTLQPVSELLTPLG

SEQ ID NO: 16650 - protein, 25 aa, synthetic construct
  REGION 1..25: note = Description of Artificial Sequence: Synthetic peptide
CVVADAVIKTLQPVSELLTPLGIDL

SEQ ID NO: 16651 - protein, 25 aa, synthetic construct
  REGION 1..25: note = Description of Artificial Sequence: Synthetic peptide
LSGLDSLDTYPSLETIQITISSFKW

SEQ ID NO: 16652 - protein, 25 aa, synthetic construct
  REGION 1..25: note = Description of Artificial Sequence: Synthetic peptide
SGLDSLDTYPSLETIQITISSFKWD

SEQ ID NO: 16653 - protein, 25 aa, synthetic construct
  REGION 1..25: note = Description of Artificial Sequence: Synthetic peptide
CLSGLDSLDTYPSLETIQITISSFK

SEQ ID NO: 16654 - protein, 25 aa, synthetic construct
  REGION 1..25: note = Description of Artificial Sequence: Synthetic peptide
KAPKEIIFLEGETLPTEVLTEEVVL

SEQ ID NO: 16655 - protein, 25 aa, synthetic construct
  REGION 1..25: note = Description of Artificial Sequence: Synthetic peptide
APKEIIFLEGETLPTEVLTEEVVLK

SEQ ID NO: 16656 - protein, 25 aa, synthetic construct
  REGION 1..25: note = Description of Artificial Sequence: Synthetic peptide
DPSFLGRYMSALNHTKKWKYPQVNG

SEQ ID NO: 16657 - protein, 25 aa, synthetic construct
  REGION 1..25: note = Description of Artificial Sequence: Synthetic peptide
ERSEKSYELQTPFEIKLAKKFDTFN

SEQ ID NO: 16658 - protein, 25 aa, synthetic construct
  REGION 1..25: note = Description of Artificial Sequence: Synthetic peptide
EKMADQAMTQMYKQARSEDKRAKVT

SEQ ID NO: 16659 - protein, 25 aa, synthetic construct
  REGION 1..25: note = Description of Artificial Sequence: Synthetic peptide
LEKMADQAMTQMYKQARSEDKRAKV

SEQ ID NO: 16660 - protein, 25 aa, synthetic construct
  REGION 1..25: note = Description of Artificial Sequence: Synthetic peptide
LAVFQSASKIITLKKRWQLALSKGV

SEQ ID NO: 16661 - protein, 25 aa, synthetic construct
  REGION 1..25: note = Description of Artificial Sequence: Synthetic peptide
VSSPDAVTAYNGYLTSSSKTPEEHF

SEQ ID NO: 16662 - protein, 25 aa, synthetic construct
  REGION 1..25: note = Description of Artificial Sequence: Synthetic peptide
SVSSPDAVTAYNGYLTSSSKTPEEH

SEQ ID NO: 16663 - protein, 25 aa, synthetic construct
  REGION 1..25: note = Description of Artificial Sequence: Synthetic peptide
VSVSSPDAVTAYNGYLTSSSKTPEE

SEQ ID NO: 16664 - protein, 25 aa, synthetic construct
  REGION 1..25: note = Description of Artificial Sequence: Synthetic peptide
VLNNDYYRSLPGVFCGVDAVNLLTN

SEQ ID NO: 16665 - protein, 25 aa, synthetic construct
  REGION 1..25: note = Description of Artificial Sequence: Synthetic peptide
VESDDYIATNGPLKVGGSCVLSGHN

SEQ ID NO: 16666 - protein, 25 aa, synthetic construct
  REGION 1..25: note = Description of Artificial Sequence: Synthetic peptide
QAVANGDSEVVLKKLKKSLNVAKSE

SEQ ID NO: 16667 - protein, 25 aa, synthetic construct
  REGION 1..25: note = Description of Artificial Sequence: Synthetic peptide
NASFDNFKFVCDNIKFADDLNQLTG

SEQ ID NO: 16668 - protein, 25 aa, synthetic construct
  REGION 1..25: note = Description of Artificial Sequence: Synthetic peptide
LHNDILLAKDTTEAFEKMVSLLSVL

SEQ ID NO: 16669 - protein, 25 aa, synthetic construct
  REGION 1..25: note = Description of Artificial Sequence: Synthetic peptide
CVQLHNDILLAKDTTEAFEKMVSLL

SEQ ID NO: 16670 - protein, 25 aa, synthetic construct
  REGION 1..25: note = Description of Artificial Sequence: Synthetic peptide
QLHNDILLAKDTTEAFEKMVSLLSV

SEQ ID NO: 16671 - protein, 25 aa, synthetic construct
  REGION 1..25: note = Description of Artificial Sequence: Synthetic peptide
VQLHNDILLAKDTTEAFEKMVSLLS

SEQ ID NO: 16672 - protein, 25 aa, synthetic construct
  REGION 1..25: note = Description of Artificial Sequence: Synthetic peptide
QCVQLHNDILLAKDTTEAFEKMVSL

SEQ ID NO: 16673 - protein, 25 aa, synthetic construct
  REGION 1..25: note = Description of Artificial Sequence: Synthetic peptide
GQQQTTLKGVEAVMYMGTLSYEQFK

SEQ ID NO: 16674 - protein, 25 aa, synthetic construct
  REGION 1..25: note = Description of Artificial Sequence: Synthetic peptide
VLLILMTARTVYDDGARRVWTLMNV

SEQ ID NO: 16675 - protein, 25 aa, synthetic construct
  REGION 1..25: note = Description of Artificial Sequence: Synthetic peptide
LILMTARTVYDDGARRVWTLMNVLT

SEQ ID NO: 16676 - protein, 25 aa, synthetic construct
  REGION 1..25: note = Description of Artificial Sequence: Synthetic peptide
RATLQAIASEFSSLPSYAAFATAQE

SEQ ID NO: 16677 - protein, 25 aa, synthetic construct
  REGION 1..25: note = Description of Artificial Sequence: Synthetic peptide
FQHANLDSCKRVLNVVCKTCGQQQT

SEQ ID NO: 16678 - protein, 25 aa, synthetic construct
  REGION 1..25: note = Description of Artificial Sequence: Synthetic peptide
GDSCNNYMLTYNKVENMTPRDLGAC

SEQ ID NO: 16679 - protein, 25 aa, synthetic construct
  REGION 1..25: note = Description of Artificial Sequence: Synthetic peptide
LVFLFVAAIFYLITPVHVMSKHTDF

SEQ ID NO: 16680 - protein, 25 aa, synthetic construct
  REGION 1..25: note = Description of Artificial Sequence: Synthetic peptide
IDYDCVSFCYMHHMELPTGVHAGTD

SEQ ID NO: 16681 - protein, 25 aa, synthetic construct
  REGION 1..25: note = Description of Artificial Sequence: Synthetic peptide
FNIDYDCVSFCYMHHMELPTGVHAG

SEQ ID NO: 16682 - protein, 25 aa, synthetic construct
  REGION 1..25: note = Description of Artificial Sequence: Synthetic peptide
NIDYDCVSFCYMHHMELPTGVHAGT

SEQ ID NO: 16683 - protein, 25 aa, synthetic construct
  REGION 1..25: note = Description of Artificial Sequence: Synthetic peptide
GFNIDYDCVSFCYMHHMELPTGVHA

SEQ ID NO: 16684 - protein, 25 aa, synthetic construct
  REGION 1..25: note = Description of Artificial Sequence: Synthetic peptide
VGFNIDYDCVSFCYMHHMELPTGVH

SEQ ID NO: 16685 - protein, 25 aa, synthetic construct
  REGION 1..25: note = Description of Artificial Sequence: Synthetic peptide
SVGFNIDYDCVSFCYMHHMELPTGV

SEQ ID NO: 16686 - protein, 25 aa, synthetic construct
  REGION 1..25: note = Description of Artificial Sequence: Synthetic peptide
RYVLMDGSIIQFPNTYLEGSVRVVT

SEQ ID NO: 16687 - protein, 25 aa, synthetic construct
  REGION 1..25: note = Description of Artificial Sequence: Synthetic peptide
TRYVLMDGSIIQFPNTYLEGSVRVV

SEQ ID NO: 16688 - protein, 25 aa, synthetic construct
  REGION 1..25: note = Description of Artificial Sequence: Synthetic peptide
PDTRYVLMDGSIIQFPNTYLEGSVR

SEQ ID NO: 16689 - protein, 25 aa, synthetic construct
  REGION 1..25: note = Description of Artificial Sequence: Synthetic peptide
YVLMDGSIIQFPNTYLEGSVRVVTT

SEQ ID NO: 16690 - protein, 25 aa, synthetic construct
  REGION 1..25: note = Description of Artificial Sequence: Synthetic peptide
VLMDGSIIQFPNTYLEGSVRVVTTF

SEQ ID NO: 16691 - protein, 25 aa, synthetic construct
  REGION 1..25: note = Description of Artificial Sequence: Synthetic peptide
DTRYVLMDGSIIQFPNTYLEGSVRV

SEQ ID NO: 16692 - protein, 25 aa, synthetic construct
  REGION 1..25: note = Description of Artificial Sequence: Synthetic peptide
RKLEKMADQAMTQMYKQARSEDKRA

SEQ ID NO: 16693 - protein, 25 aa, synthetic construct
  REGION 1..25: note = Description of Artificial Sequence: Synthetic peptide
DSEVVLKKLKKSLNVAKSEFDRDAA

SEQ ID NO: 16694 - protein, 25 aa, synthetic construct
  REGION 1..25: note = Description of Artificial Sequence: Synthetic peptide
TSVVLLSVLQQLRVESSSKLWAQCV

SEQ ID NO: 16695 - protein, 25 aa, synthetic construct
  REGION 1..25: note = Description of Artificial Sequence: Synthetic peptide
IVGDVVQEGVLTAVVIPTKKAGGTT

SEQ ID NO: 16696 - protein, 25 aa, synthetic construct
  REGION 1..25: note = Description of Artificial Sequence: Synthetic peptide
IFSRTLETAQNSVRVLQKAAITILD

SEQ ID NO: 16697 - protein, 25 aa, synthetic construct
  REGION 1..25: note = Description of Artificial Sequence: Synthetic peptide
RTVYDDGARRVWTLMNVLTLVYKVY

SEQ ID NO: 16698 - protein, 25 aa, synthetic construct
  REGION 1..25: note = Description of Artificial Sequence: Synthetic peptide
TVYDDGARRVWTLMNVLTLVYKVYY

SEQ ID NO: 16699 - protein, 25 aa, synthetic construct
  REGION 1..25: note = Description of Artificial Sequence: Synthetic peptide
EGVLTAVVIPTKKAGGTTEMLAKAL

SEQ ID NO: 16700 - protein, 25 aa, synthetic construct
  REGION 1..25: note = Description of Artificial Sequence: Synthetic peptide
EGSVRVVTTFDSEYCRHGTCERSEA

SEQ ID NO: 16701 - protein, 25 aa, synthetic construct
  REGION 1..25: note = Description of Artificial Sequence: Synthetic peptide
GSVRVVTTFDSEYCRHGTCERSEAG

SEQ ID NO: 16702 - protein, 25 aa, synthetic construct
  REGION 1..25: note = Description of Artificial Sequence: Synthetic peptide
GSIIQFPNTYLEGSVRVVTTFDSEY

SEQ ID NO: 16703 - protein, 25 aa, synthetic construct
  REGION 1..25: note = Description of Artificial Sequence: Synthetic peptide
VRMYIFFASFYYVWKSYVHVVDGCN

SEQ ID NO: 16704 - protein, 25 aa, synthetic construct
  REGION 1..25: note = Description of Artificial Sequence: Synthetic peptide
RMYIFFASFYYVWKSYVHVVDGCNS

SEQ ID NO: 16705 - protein, 25 aa, synthetic construct
  REGION 1..25: note = Description of Artificial Sequence: Synthetic peptide
KALNLGETFVTHSKGLYRKCVKSRE

SEQ ID NO: 16706 - protein, 25 aa, synthetic construct
  REGION 1..25: note = Description of Artificial Sequence: Synthetic peptide
KLKALNLGETFVTHSKGLYRKCVKS

SEQ ID NO: 16707 - protein, 25 aa, synthetic construct
  REGION 1..25: note = Description of Artificial Sequence: Synthetic peptide
LNLGETFVTHSKGLYRKCVKSREET

SEQ ID NO: 16708 - protein, 25 aa, synthetic construct
  REGION 1..25: note = Description of Artificial Sequence: Synthetic peptide
ALNLGETFVTHSKGLYRKCVKSREE

SEQ ID NO: 16709 - protein, 25 aa, synthetic construct
  REGION 1..25: note = Description of Artificial Sequence: Synthetic peptide
LKALNLGETFVTHSKGLYRKCVKSR

SEQ ID NO: 16710 - protein, 25 aa, synthetic construct
  REGION 1..25: note = Description of Artificial Sequence: Synthetic peptide
LGETFVTHSKGLYRKCVKSREETGL

SEQ ID NO: 16711 - protein, 25 aa, synthetic construct
  REGION 1..25: note = Description of Artificial Sequence: Synthetic peptide
HEGKTFYVLPNDDTLRVEAFEYYHT

SEQ ID NO: 16712 - protein, 25 aa, synthetic construct
  REGION 1..25: note = Description of Artificial Sequence: Synthetic peptide
EGKTFYVLPNDDTLRVEAFEYYHTT

SEQ ID NO: 16713 - protein, 25 aa, synthetic construct
  REGION 1..25: note = Description of Artificial Sequence: Synthetic peptide
QTIEVNSFSGYLKLTDNVYIKNADI

SEQ ID NO: 16714 - protein, 25 aa, synthetic construct
  REGION 1..25: note = Description of Artificial Sequence: Synthetic peptide
AYIICISTKHFYWFFSNYLKRRVVF

SEQ ID NO: 16715 - protein, 25 aa, synthetic construct
  REGION 1..25: note = Description of Artificial Sequence: Synthetic peptide
NYAKPFLNKVVSTTTNIVTRCLNRV

SEQ ID NO: 16716 - protein, 25 aa, synthetic construct
  REGION 1..25: note = Description of Artificial Sequence: Synthetic peptide
ANYAKPFLNKVVSTTTNIVTRCLNR

SEQ ID NO: 16717 - protein, 25 aa, synthetic construct
  REGION 1..25: note = Description of Artificial Sequence: Synthetic peptide
YAKPFLNKVVSTTTNIVTRCLNRVC

SEQ ID NO: 16718 - protein, 25 aa, synthetic construct
  REGION 1..25: note = Description of Artificial Sequence: Synthetic peptide
AKPFLNKVVSTTTNIVTRCLNRVCT

SEQ ID NO: 16719 - protein, 25 aa, synthetic construct
  REGION 1..25: note = Description of Artificial Sequence: Synthetic peptide
LVPFWITIAYIICISTKHFYWFFSN

SEQ ID NO: 16720 - protein, 25 aa, synthetic construct
  REGION 1..25: note = Description of Artificial Sequence: Synthetic peptide
PLVPFWITIAYIICISTKHFYWFFS

SEQ ID NO: 16721 - protein, 25 aa, synthetic construct
  REGION 1..25: note = Description of Artificial Sequence: Synthetic peptide
WITIAYIICISTKHFYWFFSNYLKR

SEQ ID NO: 16722 - protein, 25 aa, synthetic construct
  REGION 1..25: note = Description of Artificial Sequence: Synthetic peptide
TIAYIICISTKHFYWFFSNYLKRRV

SEQ ID NO: 16723 - protein, 25 aa, synthetic construct
  REGION 1..25: note = Description of Artificial Sequence: Synthetic peptide
ITIAYIICISTKHFYWFFSNYLKRR

SEQ ID NO: 16724 - protein, 25 aa, synthetic construct
  REGION 1..25: note = Description of Artificial Sequence: Synthetic peptide
FWITIAYIICISTKHFYWFFSNYLK

SEQ ID NO: 16725 - protein, 25 aa, synthetic construct
  REGION 1..25: note = Description of Artificial Sequence: Synthetic peptide
VPFWITIAYIICISTKHFYWFFSNY

SEQ ID NO: 16726 - protein, 25 aa, synthetic construct
  REGION 1..25: note = Description of Artificial Sequence: Synthetic peptide
PFWITIAYIICISTKHFYWFFSNYL

SEQ ID NO: 16727 - protein, 25 aa, synthetic construct
  REGION 1..25: note = Description of Artificial Sequence: Synthetic peptide
TPLVPFWITIAYIICISTKHFYWFF

SEQ ID NO: 16728 - protein, 25 aa, synthetic construct
  REGION 1..25: note = Description of Artificial Sequence: Synthetic peptide
SHFVNLDNLRANNTKGSLPINVIVF

SEQ ID NO: 16729 - protein, 25 aa, synthetic construct
  REGION 1..25: note = Description of Artificial Sequence: Synthetic peptide
TTEAFEKMVSLLSVLLSMQGAVDIN

SEQ ID NO: 16730 - protein, 25 aa, synthetic construct
  REGION 1..25: note = Description of Artificial Sequence: Synthetic peptide
FNMVYMPASWVMRIMTWLDMVDTSL

SEQ ID NO: 16731 - protein, 25 aa, synthetic construct
  REGION 1..25: note = Description of Artificial Sequence: Synthetic peptide
LLEIKDTEKYCALAPNMMVTNNTFT

SEQ ID NO: 16732 - protein, 25 aa, synthetic construct
  REGION 1..25: note = Description of Artificial Sequence: Synthetic peptide
LEIKDTEKYCALAPNMMVTNNTFTL

SEQ ID NO: 16733 - protein, 25 aa, synthetic construct
  REGION 1..25: note = Description of Artificial Sequence: Synthetic peptide
DVKCTSVVLLSVLQQLRVESSSKLW

SEQ ID NO: 16734 - protein, 25 aa, synthetic construct
  REGION 1..25: note = Description of Artificial Sequence: Synthetic peptide
KCTSVVLLSVLQQLRVESSSKLWAQ

SEQ ID NO: 16735 - protein, 25 aa, synthetic construct
  REGION 1..25: note = Description of Artificial Sequence: Synthetic peptide
VKCTSVVLLSVLQQLRVESSSKLWA

SEQ ID NO: 16736 - protein, 25 aa, synthetic construct
  REGION 1..25: note = Description of Artificial Sequence: Synthetic peptide
CTSVVLLSVLQQLRVESSSKLWAQC

SEQ ID NO: 16737 - protein, 25 aa, synthetic construct
  REGION 1..25: note = Description of Artificial Sequence: Synthetic peptide
MSDVKCTSVVLLSVLQQLRVESSSK

SEQ ID NO: 16738 - protein, 25 aa, synthetic construct
  REGION 1..25: note = Description of Artificial Sequence: Synthetic peptide
PSFLGRYMSALNHTKKWKYPQVNGL

SEQ ID NO: 16739 - protein, 25 aa, synthetic construct
  REGION 1..25: note = Description of Artificial Sequence: Synthetic peptide
VGPNVNKGEDIQLLKSAYENFNQHE

SEQ ID NO: 16740 - protein, 25 aa, synthetic construct
  REGION 1..25: note = Description of Artificial Sequence: Synthetic peptide
VVGPNVNKGEDIQLLKSAYENFNQH

SEQ ID NO: 16741 - protein, 25 aa, synthetic construct
  REGION 1..25: note = Description of Artificial Sequence: Synthetic peptide
SAMQTMLFTMLRKLDNDALNNIINN

SEQ ID NO: 16742 - protein, 25 aa, synthetic construct
  REGION 1..25: note = Description of Artificial Sequence: Synthetic peptide
YTVEEAKTVLKKCKSAFYILPSIIS

SEQ ID NO: 16743 - protein, 25 aa, synthetic construct
  REGION 1..25: note = Description of Artificial Sequence: Synthetic peptide
GYTVEEAKTVLKKCKSAFYILPSII

SEQ ID NO: 16744 - protein, 25 aa, synthetic construct
  REGION 1..25: note = Description of Artificial Sequence: Synthetic peptide
YEKLKPVLDWLEEKFKEGVEFLRDG

SEQ ID NO: 16745 - protein, 25 aa, synthetic construct
  REGION 1..25: note = Description of Artificial Sequence: Synthetic peptide
EKLKPVLDWLEEKFKEGVEFLRDGW

SEQ ID NO: 16746 - protein, 25 aa, synthetic construct
  REGION 1..25: note = Description of Artificial Sequence: Synthetic peptide
LDQAISMWALIISVTSNYSGVVTTV

SEQ ID NO: 16747 - protein, 25 aa, synthetic construct
  REGION 1..25: note = Description of Artificial Sequence: Synthetic peptide
ALDQAISMWALIISVTSNYSGVVTT

SEQ ID NO: 16748 - protein, 25 aa, synthetic construct
  REGION 1..25: note = Description of Artificial Sequence: Synthetic peptide
YMPASWVMRIMTWLDMVDTSLSGFK

SEQ ID NO: 16749 - protein, 25 aa, synthetic construct
  REGION 1..25: note = Description of Artificial Sequence: Synthetic peptide
ITPVHVMSKHTDFSSEIIGYKAIDG

SEQ ID NO: 16750 - protein, 25 aa, synthetic construct
  REGION 1..25: note = Description of Artificial Sequence: Synthetic peptide
SCTLSEQLDFIDTKRGVYCCREHEH

SEQ ID NO: 16751 - protein, 25 aa, synthetic construct
  REGION 1..25: note = Description of Artificial Sequence: Synthetic peptide
TLSEQLDFIDTKRGVYCCREHEHEI

SEQ ID NO: 16752 - protein, 25 aa, synthetic construct
  REGION 1..25: note = Description of Artificial Sequence: Synthetic peptide
LSEQLDFIDTKRGVYCCREHEHEIA

SEQ ID NO: 16753 - protein, 25 aa, synthetic construct
  REGION 1..25: note = Description of Artificial Sequence: Synthetic peptide
CTLSEQLDFIDTKRGVYCCREHEHE

SEQ ID NO: 16754 - protein, 25 aa, synthetic construct
  REGION 1..25: note = Description of Artificial Sequence: Synthetic peptide
YLITPVHVMSKHTDFSSEIIGYKAI

SEQ ID NO: 16755 - protein, 25 aa, synthetic construct
  REGION 1..25: note = Description of Artificial Sequence: Synthetic peptide
IFYLITPVHVMSKHTDFSSEIIGYK

SEQ ID NO: 16756 - protein, 25 aa, synthetic construct
  REGION 1..25: note = Description of Artificial Sequence: Synthetic peptide
AIFYLITPVHVMSKHTDFSSEIIGY

SEQ ID NO: 16757 - protein, 25 aa, synthetic construct
  REGION 1..25: note = Description of Artificial Sequence: Synthetic peptide
FYLITPVHVMSKHTDFSSEIIGYKA

SEQ ID NO: 16758 - protein, 25 aa, synthetic construct
  REGION 1..25: note = Description of Artificial Sequence: Synthetic peptide
MLNPNYEDLLIRKSNHNFLVQAGNV

SEQ ID NO: 16759 - protein, 25 aa, synthetic construct
  REGION 1..25: note = Description of Artificial Sequence: Synthetic peptide
DMLNPNYEDLLIRKSNHNFLVQAGN

SEQ ID NO: 16760 - protein, 25 aa, synthetic construct
  REGION 1..25: note = Description of Artificial Sequence: Synthetic peptide
SRTLETAQNSVRVLQKAAITILDGI

SEQ ID NO: 16761 - protein, 25 aa, synthetic construct
  REGION 1..25: note = Description of Artificial Sequence: Synthetic peptide
FSRTLETAQNSVRVLQKAAITILDG

SEQ ID NO: 16762 - protein, 25 aa, synthetic construct
  REGION 1..25: note = Description of Artificial Sequence: Synthetic peptide
RTLETAQNSVRVLQKAAITILDGIS

SEQ ID NO: 16763 - protein, 25 aa, synthetic construct
  REGION 1..25: note = Description of Artificial Sequence: Synthetic peptide
TEEVVLKTGDLQPLEQPTSEAVEAP

SEQ ID NO: 16764 - protein, 25 aa, synthetic construct
  REGION 1..25: note = Description of Artificial Sequence: Synthetic peptide
VLTEEVVLKTGDLQPLEQPTSEAVE

SEQ ID NO: 16765 - protein, 25 aa, synthetic construct
  REGION 1..25: note = Description of Artificial Sequence: Synthetic peptide
LTEEVVLKTGDLQPLEQPTSEAVEA

SEQ ID NO: 16766 - protein, 25 aa, synthetic construct
  REGION 1..25: note = Description of Artificial Sequence: Synthetic peptide
EEVVLKTGDLQPLEQPTSEAVEAPL

SEQ ID NO: 16767 - protein, 25 aa, synthetic construct
  REGION 1..25: note = Description of Artificial Sequence: Synthetic peptide
KVKPTVVVNAANVYLKHGGGVAGAL

SEQ ID NO: 16768 - protein, 25 aa, synthetic construct
  REGION 1..25: note = Description of Artificial Sequence: Synthetic peptide
AKKVKPTVVVNAANVYLKHGGGVAG

SEQ ID NO: 16769 - protein, 25 aa, synthetic construct
  REGION 1..25: note = Description of Artificial Sequence: Synthetic peptide
KKVKPTVVVNAANVYLKHGGGVAGA

SEQ ID NO: 16770 - protein, 25 aa, synthetic construct
  REGION 1..25: note = Description of Artificial Sequence: Synthetic peptide
VKPTVVVNAANVYLKHGGGVAGALN

SEQ ID NO: 16771 - protein, 25 aa, synthetic construct
  REGION 1..25: note = Description of Artificial Sequence: Synthetic peptide
AMVRMYIFFASFYYVWKSYVHVVDG

SEQ ID NO: 16772 - protein, 25 aa, synthetic construct
  REGION 1..25: note = Description of Artificial Sequence: Synthetic peptide
AVLDMCASLKELLQNGMNGRTILGS

SEQ ID NO: 16773 - protein, 25 aa, synthetic construct
  REGION 1..25: note = Description of Artificial Sequence: Synthetic peptide
VVQTIEVNSFSGYLKLTDNVYIKNA

SEQ ID NO: 16774 - protein, 25 aa, synthetic construct
  REGION 1..25: note = Description of Artificial Sequence: Synthetic peptide
PVVQTIEVNSFSGYLKLTDNVYIKN

SEQ ID NO: 16775 - protein, 25 aa, synthetic construct
  REGION 1..25: note = Description of Artificial Sequence: Synthetic peptide
NTTKGGRFVLALLSDLQDLKWARFP

SEQ ID NO: 16776 - protein, 25 aa, synthetic construct
  REGION 1..25: note = Description of Artificial Sequence: Synthetic peptide
YNTTKGGRFVLALLSDLQDLKWARF

SEQ ID NO: 16777 - protein, 25 aa, synthetic construct
  REGION 1..25: note = Description of Artificial Sequence: Synthetic peptide
YYNTTKGGRFVLALLSDLQDLKWAR

SEQ ID NO: 16778 - protein, 25 aa, synthetic construct
  REGION 1..25: note = Description of Artificial Sequence: Synthetic peptide
TPPIKDFGGFNFSQILPDPSKPSKR

SEQ ID NO: 16779 - protein, 25 aa, synthetic construct
  REGION 1..25: note = Description of Artificial Sequence: Synthetic peptide
SASKIITLKKRWQLALSKGVHFVCN

SEQ ID NO: 16780 - protein, 25 aa, synthetic construct
  REGION 1..25: note = Description of Artificial Sequence: Synthetic peptide
QSASKIITLKKRWQLALSKGVHFVC

SEQ ID NO: 16781 - protein, 25 aa, synthetic construct
  REGION 1..25: note = Description of Artificial Sequence: Synthetic peptide
EAVMYMGTLSYEQFKKGVQIPCTCG

SEQ ID NO: 16782 - protein, 25 aa, synthetic construct
  REGION 1..25: note = Description of Artificial Sequence: Synthetic peptide
VEAVMYMGTLSYEQFKKGVQIPCTC

SEQ ID NO: 16783 - protein, 25 aa, synthetic construct
  REGION 1..25: note = Description of Artificial Sequence: Synthetic peptide
TFTCASEYTGNYQCGHYKHITSKET

SEQ ID NO: 16784 - protein, 25 aa, synthetic construct
  REGION 1..25: note = Description of Artificial Sequence: Synthetic peptide
YTPSKLIEYTDFATSACVLAAECTI

SEQ ID NO: 16785 - protein, 25 aa, synthetic construct
  REGION 1..25: note = Description of Artificial Sequence: Synthetic peptide
VGNICYTPSKLIEYTDFATSACVLA

SEQ ID NO: 16786 - protein, 25 aa, synthetic construct
  REGION 1..25: note = Description of Artificial Sequence: Synthetic peptide
GNICYTPSKLIEYTDFATSACVLAA

SEQ ID NO: 16787 - protein, 25 aa, synthetic construct
  REGION 1..25: note = Description of Artificial Sequence: Synthetic peptide
GTFTCASEYTGNYQCGHYKHITSKE

SEQ ID NO: 16788 - protein, 25 aa, synthetic construct
  REGION 1..25: note = Description of Artificial Sequence: Synthetic peptide
FVETVKGLDYKAFKQIVESCGNFKV

SEQ ID NO: 16789 - protein, 25 aa, synthetic construct
  REGION 1..25: note = Description of Artificial Sequence: Synthetic peptide
AFVETVKGLDYKAFKQIVESCGNFK

SEQ ID NO: 16790 - protein, 25 aa, synthetic construct
  REGION 1..25: note = Description of Artificial Sequence: Synthetic peptide
VETVKGLDYKAFKQIVESCGNFKVT

SEQ ID NO: 16791 - protein, 25 aa, synthetic construct
  REGION 1..25: note = Description of Artificial Sequence: Synthetic peptide
LTSQWLTNIFGTVYEKLKPVLDWLE

SEQ ID NO: 16792 - protein, 25 aa, synthetic construct
  REGION 1..25: note = Description of Artificial Sequence: Synthetic peptide
AVGNICYTPSKLIEYTDFATSACVL

SEQ ID NO: 16793 - protein, 25 aa, synthetic construct
  REGION 1..25: note = Description of Artificial Sequence: Synthetic peptide
LNNLNRGMVLGSLAATVRLQAGNAT

SEQ ID NO: 16794 - protein, 25 aa, synthetic construct
  REGION 1..25: note = Description of Artificial Sequence: Synthetic peptide
LNRGMVLGSLAATVRLQAGNATEVP

SEQ ID NO: 16795 - protein, 25 aa, synthetic construct
  REGION 1..25: note = Description of Artificial Sequence: Synthetic peptide
NLNRGMVLGSLAATVRLQAGNATEV

SEQ ID NO: 16796 - protein, 25 aa, synthetic construct
  REGION 1..25: note = Description of Artificial Sequence: Synthetic peptide
NRGMVLGSLAATVRLQAGNATEVPA

SEQ ID NO: 16797 - protein, 25 aa, synthetic construct
  REGION 1..25: note = Description of Artificial Sequence: Synthetic peptide
NNLNRGMVLGSLAATVRLQAGNATE

SEQ ID NO: 16798 - protein, 25 aa, synthetic construct
  REGION 1..25: note = Description of Artificial Sequence: Synthetic peptide
RCDIKDLPKEITVATSRTLSYYKLG

SEQ ID NO: 16799 - protein, 25 aa, synthetic construct
  REGION 1..25: note = Description of Artificial Sequence: Synthetic peptide
KLKTLVATAEAELAKNVSLDNVLST

SEQ ID NO: 16800 - protein, 25 aa, synthetic construct
  REGION 1..25: note = Description of Artificial Sequence: Synthetic peptide
EKLKTLVATAEAELAKNVSLDNVLS

SEQ ID NO: 16801 - protein, 25 aa, synthetic construct
  REGION 1..25: note = Description of Artificial Sequence: Synthetic peptide
EFSSLPSYAAFATAQEAYEQAVANG

SEQ ID NO: 16802 - protein, 25 aa, synthetic construct
  REGION 1..25: note = Description of Artificial Sequence: Synthetic peptide
FSSLPSYAAFATAQEAYEQAVANGD

SEQ ID NO: 16803 - protein, 25 aa, synthetic construct
  REGION 1..25: note = Description of Artificial Sequence: Synthetic peptide
NIIPLTTAAKLMVVIPDYNTYKNTC

SEQ ID NO: 16804 - protein, 25 aa, synthetic construct
  REGION 1..25: note = Description of Artificial Sequence: Synthetic peptide
LNIIPLTTAAKLMVVIPDYNTYKNT

SEQ ID NO: 16805 - protein, 25 aa, synthetic construct
  REGION 1..25: note = Description of Artificial Sequence: Synthetic peptide
IIPLTTAAKLMVVIPDYNTYKNTCD

SEQ ID NO: 16806 - protein, 25 aa, synthetic construct
  REGION 1..25: note = Description of Artificial Sequence: Synthetic peptide
PLNIIPLTTAAKLMVVIPDYNTYKN

SEQ ID NO: 16807 - protein, 25 aa, synthetic construct
  REGION 1..25: note = Description of Artificial Sequence: Synthetic peptide
NPTTFHLDGEVITFDNLKTLLSLRE

SEQ ID NO: 16808 - protein, 25 aa, synthetic construct
  REGION 1..25: note = Description of Artificial Sequence: Synthetic peptide
SNPTTFHLDGEVITFDNLKTLLSLR

SEQ ID NO: 16809 - protein, 25 aa, synthetic construct
  REGION 1..25: note = Description of Artificial Sequence: Synthetic peptide
ITTYPGQGLNGYTVEEAKTVLKKCK

SEQ ID NO: 16810 - protein, 25 aa, synthetic construct
  REGION 1..25: note = Description of Artificial Sequence: Synthetic peptide
TTYPGQGLNGYTVEEAKTVLKKCKS

SEQ ID NO: 16811 - protein, 25 aa, synthetic construct
  REGION 1..25: note = Description of Artificial Sequence: Synthetic peptide
LREVRTIKVFTTVDNINLHTQVVDM

SEQ ID NO: 16812 - protein, 25 aa, synthetic construct
  REGION 1..25: note = Description of Artificial Sequence: Synthetic peptide
FDVVRQCSGVTFQSAVKRTIKGTHH

SEQ ID NO: 16813 - protein, 25 aa, synthetic construct
  REGION 1..25: note = Description of Artificial Sequence: Synthetic peptide
PFDVVRQCSGVTFQSAVKRTIKGTH

SEQ ID NO: 16814 - protein, 25 aa, synthetic construct
  REGION 1..25: note = Description of Artificial Sequence: Synthetic peptide
KQDDKKIKACVEEVTTTLEETKFLT

SEQ ID NO: 16815 - protein, 25 aa, synthetic construct
  REGION 1..25: note = Description of Artificial Sequence: Synthetic peptide
KHITSKETLYCIDGALLTKSSEYKG

SEQ ID NO: 16816 - protein, 25 aa, synthetic construct
  REGION 1..25: note = Description of Artificial Sequence: Synthetic peptide
HITSKETLYCIDGALLTKSSEYKGP

SEQ ID NO: 16817 - protein, 25 aa, synthetic construct
  REGION 1..25: note = Description of Artificial Sequence: Synthetic peptide
YKHITSKETLYCIDGALLTKSSEYK

SEQ ID NO: 16818 - protein, 25 aa, synthetic construct
  REGION 1..25: note = Description of Artificial Sequence: Synthetic peptide
ITSKETLYCIDGALLTKSSEYKGPI

SEQ ID NO: 16819 - protein, 25 aa, synthetic construct
  REGION 1..25: note = Description of Artificial Sequence: Synthetic peptide
VYCPRHVICTSEDMLNPNYEDLLIR

SEQ ID NO: 16820 - protein, 25 aa, synthetic construct
  REGION 1..25: note = Description of Artificial Sequence: Synthetic peptide
CPRHVICTSEDMLNPNYEDLLIRKS

SEQ ID NO: 16821 - protein, 25 aa, synthetic construct
  REGION 1..25: note = Description of Artificial Sequence: Synthetic peptide
YCPRHVICTSEDMLNPNYEDLLIRK

SEQ ID NO: 16822 - protein, 25 aa, synthetic construct
  REGION 1..25: note = Description of Artificial Sequence: Synthetic peptide
KTLLSLREVRTIKVFTTVDNINLHT

SEQ ID NO: 16823 - protein, 25 aa, synthetic construct
  REGION 1..25: note = Description of Artificial Sequence: Synthetic peptide
IWNVKDFMSLSEQLRKQIRSAAKKN

SEQ ID NO: 16824 - protein, 25 aa, synthetic construct
  REGION 1..25: note = Description of Artificial Sequence: Synthetic peptide
NVKDFMSLSEQLRKQIRSAAKKNNL

SEQ ID NO: 16825 - protein, 25 aa, synthetic construct
  REGION 1..25: note = Description of Artificial Sequence: Synthetic peptide
WNVKDFMSLSEQLRKQIRSAAKKNN

SEQ ID NO: 16826 - protein, 25 aa, synthetic construct
  REGION 1..25: note = Description of Artificial Sequence: Synthetic peptide
HFLPRVFSAVGNICYTPSKLIEYTD

SEQ ID NO: 16827 - protein, 25 aa, synthetic construct
  REGION 1..25: note = Description of Artificial Sequence: Synthetic peptide
FLHFLPRVFSAVGNICYTPSKLIEY

SEQ ID NO: 16828 - protein, 25 aa, synthetic construct
  REGION 1..25: note = Description of Artificial Sequence: Synthetic peptide
LHFLPRVFSAVGNICYTPSKLIEYT

SEQ ID NO: 16829 - protein, 25 aa, synthetic construct
  REGION 1..25: note = Description of Artificial Sequence: Synthetic peptide
LLSLREVRTIKVFTTVDNINLHTQV

SEQ ID NO: 16830 - protein, 25 aa, synthetic construct
  REGION 1..25: note = Description of Artificial Sequence: Synthetic peptide
FLPRVFSAVGNICYTPSKLIEYTDF

SEQ ID NO: 16831 - protein, 25 aa, synthetic construct
  REGION 1..25: note = Description of Artificial Sequence: Synthetic peptide
LPRVFSAVGNICYTPSKLIEYTDFA

SEQ ID NO: 16832 - protein, 25 aa, synthetic construct
  REGION 1..25: note = Description of Artificial Sequence: Synthetic peptide
QVESDDYIATNGPLKVGGSCVLSGH

SEQ ID NO: 16833 - protein, 25 aa, synthetic construct
  REGION 1..25: note = Description of Artificial Sequence: Synthetic peptide
NAMQVESDDYIATNGPLKVGGSCVL

SEQ ID NO: 16834 - protein, 25 aa, synthetic construct
  REGION 1..25: note = Description of Artificial Sequence: Synthetic peptide
NNAMQVESDDYIATNGPLKVGGSCV

SEQ ID NO: 16835 - protein, 25 aa, synthetic construct
  REGION 1..25: note = Description of Artificial Sequence: Synthetic peptide
AMQVESDDYIATNGPLKVGGSCVLS

SEQ ID NO: 16836 - protein, 25 aa, synthetic construct
  REGION 1..25: note = Description of Artificial Sequence: Synthetic peptide
MQVESDDYIATNGPLKVGGSCVLSG

SEQ ID NO: 16837 - protein, 25 aa, synthetic construct
  REGION 1..25: note = Description of Artificial Sequence: Synthetic peptide
QVAKSHNIALIWNVKDFMSLSEQLR

SEQ ID NO: 16838 - protein, 25 aa, synthetic construct
  REGION 1..25: note = Description of Artificial Sequence: Synthetic peptide
DILLAKDTTEAFEKMVSLLSVLLSM

SEQ ID NO: 16839 - protein, 25 aa, synthetic construct
  REGION 1..25: note = Description of Artificial Sequence: Synthetic peptide
SLPSYAAFATAQEAYEQAVANGDSE

SEQ ID NO: 16840 - protein, 25 aa, synthetic construct
  REGION 1..25: note = Description of Artificial Sequence: Synthetic peptide
CGHYKHITSKETLYCIDGALLTKSS

SEQ ID NO: 16841 - protein, 25 aa, synthetic construct
  REGION 1..25: note = Description of Artificial Sequence: Synthetic peptide
DNYITTYPGQGLNGYTVEEAKTVLK

SEQ ID NO: 16842 - protein, 25 aa, synthetic construct
  REGION 1..25: note = Description of Artificial Sequence: Synthetic peptide
RKVPTDNYITTYPGQGLNGYTVEEA

SEQ ID NO: 16843 - protein, 25 aa, synthetic construct
  REGION 1..25: note = Description of Artificial Sequence: Synthetic peptide
ALRKVPTDNYITTYPGQGLNGYTVE

SEQ ID NO: 16844 - protein, 25 aa, synthetic construct
  REGION 1..25: note = Description of Artificial Sequence: Synthetic peptide
LRKVPTDNYITTYPGQGLNGYTVEE

SEQ ID NO: 16845 - protein, 25 aa, synthetic construct
  REGION 1..25: note = Description of Artificial Sequence: Synthetic peptide
KALRKVPTDNYITTYPGQGLNGYTV

SEQ ID NO: 16846 - protein, 25 aa, synthetic construct
  REGION 1..25: note = Description of Artificial Sequence: Synthetic peptide
SLDNVLSTFISAARQGFVDSDVETK

SEQ ID NO: 16847 - protein, 25 aa, synthetic construct
  REGION 1..25: note = Description of Artificial Sequence: Synthetic peptide
LDNVLSTFISAARQGFVDSDVETKD

SEQ ID NO: 16848 - protein, 25 aa, synthetic construct
  REGION 1..25: note = Description of Artificial Sequence: Synthetic peptide
TPEEHFIETISLAGSYKDWSYSGQS

SEQ ID NO: 16849 - protein, 25 aa, synthetic construct
  REGION 1..25: note = Description of Artificial Sequence: Synthetic peptide
GQGLNGYTVEEAKTVLKKCKSAFYI

SEQ ID NO: 16850 - protein, 25 aa, synthetic construct
  REGION 1..25: note = Description of Artificial Sequence: Synthetic peptide
QGLNGYTVEEAKTVLKKCKSAFYIL

SEQ ID NO: 16851 - protein, 25 aa, synthetic construct
  REGION 1..25: note = Description of Artificial Sequence: Synthetic peptide
YASAVVLLILMTARTVYDDGARRVW

SEQ ID NO: 16852 - protein, 25 aa, synthetic construct
  REGION 1..25: note = Description of Artificial Sequence: Synthetic peptide
VMYASAVVLLILMTARTVYDDGARR

SEQ ID NO: 16853 - protein, 25 aa, synthetic construct
  REGION 1..25: note = Description of Artificial Sequence: Synthetic peptide
MYASAVVLLILMTARTVYDDGARRV

SEQ ID NO: 16854 - protein, 25 aa, synthetic construct
  REGION 1..25: note = Description of Artificial Sequence: Synthetic peptide
VVSTTTNIVTRCLNRVCTNYMPYFF

SEQ ID NO: 16855 - protein, 25 aa, synthetic construct
  REGION 1..25: note = Description of Artificial Sequence: Synthetic peptide
KVVSTTTNIVTRCLNRVCTNYMPYF

SEQ ID NO: 16856 - protein, 25 aa, synthetic construct
  REGION 1..25: note = Description of Artificial Sequence: Synthetic peptide
VSTTTNIVTRCLNRVCTNYMPYFFT

SEQ ID NO: 16857 - protein, 25 aa, synthetic construct
  REGION 1..25: note = Description of Artificial Sequence: Synthetic peptide
TDPSFLGRYMSALNHTKKWKYPQVN

SEQ ID NO: 16858 - protein, 25 aa, synthetic construct
  REGION 1..25: note = Description of Artificial Sequence: Synthetic peptide
TTDPSFLGRYMSALNHTKKWKYPQV

SEQ ID NO: 16859 - protein, 25 aa, synthetic construct
  REGION 1..25: note = Description of Artificial Sequence: Synthetic peptide
HTTDPSFLGRYMSALNHTKKWKYPQ

SEQ ID NO: 16860 - protein, 25 aa, synthetic construct
  REGION 1..25: note = Description of Artificial Sequence: Synthetic peptide
AYKDYLASGGQPITNCVKMLCTHTG

SEQ ID NO: 16861 - protein, 25 aa, synthetic construct
  REGION 1..25: note = Description of Artificial Sequence: Synthetic peptide
LTLGVYDYLVSTQEFRYMNSQGLLP

SEQ ID NO: 16862 - protein, 25 aa, synthetic construct
  REGION 1..25: note = Description of Artificial Sequence: Synthetic peptide
KLEKMADQAMTQMYKQARSEDKRAK

SEQ ID NO: 16863 - protein, 25 aa, synthetic construct
  REGION 1..25: note = Description of Artificial Sequence: Synthetic peptide
ECPNFVFPLNSIIKTIQPRVEKKKL

SEQ ID NO: 16864 - protein, 25 aa, synthetic construct
  REGION 1..25: note = Description of Artificial Sequence: Synthetic peptide
NEFACVVADAVIKTLQPVSELLTPL

SEQ ID NO: 16865 - protein, 25 aa, synthetic construct
  REGION 1..25: note = Description of Artificial Sequence: Synthetic peptide
KFVCDNIKFADDLNQLTGYKKPASR

SEQ ID NO: 16866 - protein, 25 aa, synthetic construct
  REGION 1..25: note = Description of Artificial Sequence: Synthetic peptide
VCDNIKFADDLNQLTGYKKPASREL

SEQ ID NO: 16867 - protein, 25 aa, synthetic construct
  REGION 1..25: note = Description of Artificial Sequence: Synthetic peptide
FVCDNIKFADDLNQLTGYKKPASRE

SEQ ID NO: 16868 - protein, 25 aa, synthetic construct
  REGION 1..25: note = Description of Artificial Sequence: Synthetic peptide
EQRKQDDKKIKACVEEVTTTLEETK

SEQ ID NO: 16869 - protein, 25 aa, synthetic construct
  REGION 1..25: note = Description of Artificial Sequence: Synthetic peptide
QRKQDDKKIKACVEEVTTTLEETKF

SEQ ID NO: 16870 - protein, 25 aa, synthetic construct
  REGION 1..25: note = Description of Artificial Sequence: Synthetic peptide
TDNYITTYPGQGLNGYTVEEAKTVL

SEQ ID NO: 16871 - protein, 25 aa, synthetic construct
  REGION 1..25: note = Description of Artificial Sequence: Synthetic peptide
MDGSIIQFPNTYLEGSVRVVTTFDS

SEQ ID NO: 16872 - protein, 25 aa, synthetic construct
  REGION 1..25: note = Description of Artificial Sequence: Synthetic peptide
LMDGSIIQFPNTYLEGSVRVVTTFD

SEQ ID NO: 16873 - protein, 25 aa, synthetic construct
  REGION 1..25: note = Description of Artificial Sequence: Synthetic peptide
DNIKFADDLNQLTGYKKPASRELKV

SEQ ID NO: 16874 - protein, 25 aa, synthetic construct
  REGION 1..25: note = Description of Artificial Sequence: Synthetic peptide
VVLLILMTARTVYDDGARRVWTLMN

SEQ ID NO: 16875 - protein, 25 aa, synthetic construct
  REGION 1..25: note = Description of Artificial Sequence: Synthetic peptide
LNGYTVEEAKTVLKKCKSAFYILPS

SEQ ID NO: 16876 - protein, 25 aa, synthetic construct
  REGION 1..25: note = Description of Artificial Sequence: Synthetic peptide
GHYKHITSKETLYCIDGALLTKSSE

SEQ ID NO: 16877 - protein, 25 aa, synthetic construct
  REGION 1..25: note = Description of Artificial Sequence: Synthetic peptide
KNVSLDNVLSTFISAARQGFVDSDV

SEQ ID NO: 16878 - protein, 25 aa, synthetic construct
  REGION 1..25: note = Description of Artificial Sequence: Synthetic peptide
VSLDNVLSTFISAARQGFVDSDVET

SEQ ID NO: 16879 - protein, 25 aa, synthetic construct
  REGION 1..25: note = Description of Artificial Sequence: Synthetic peptide
AKNVSLDNVLSTFISAARQGFVDSD

SEQ ID NO: 16880 - protein, 25 aa, synthetic construct
  REGION 1..25: note = Description of Artificial Sequence: Synthetic peptide
NVSLDNVLSTFISAARQGFVDSDVE

SEQ ID NO: 16881 - protein, 25 aa, synthetic construct
  REGION 1..25: note = Description of Artificial Sequence: Synthetic peptide
FTPLVPFWITIAYIICISTKHFYWF

SEQ ID NO: 16882 - protein, 25 aa, synthetic construct
  REGION 1..25: note = Description of Artificial Sequence: Synthetic peptide
MFTPLVPFWITIAYIICISTKHFYW

SEQ ID NO: 16883 - protein, 25 aa, synthetic construct
  REGION 1..25: note = Description of Artificial Sequence: Synthetic peptide
MPLKAPKEIIFLEGETLPTEVLTEE

SEQ ID NO: 16884 - protein, 25 aa, synthetic construct
  REGION 1..25: note = Description of Artificial Sequence: Synthetic peptide
LMPLKAPKEIIFLEGETLPTEVLTE

SEQ ID NO: 16885 - protein, 25 aa, synthetic construct
  REGION 1..25: note = Description of Artificial Sequence: Synthetic peptide
LKAPKEIIFLEGETLPTEVLTEEVV

SEQ ID NO: 16886 - protein, 25 aa, synthetic construct
  REGION 1..25: note = Description of Artificial Sequence: Synthetic peptide
PLKAPKEIIFLEGETLPTEVLTEEV

SEQ ID NO: 16887 - protein, 25 aa, synthetic construct
  REGION 1..25: note = Description of Artificial Sequence: Synthetic peptide
LLMPLKAPKEIIFLEGETLPTEVLT

SEQ ID NO: 16888 - protein, 25 aa, synthetic construct
  REGION 1..25: note = Description of Artificial Sequence: Synthetic peptide
NKVVSTTTNIVTRCLNRVCTNYMPY

SEQ ID NO: 16889 - protein, 25 aa, synthetic construct
  REGION 1..25: note = Description of Artificial Sequence: Synthetic peptide
SHEGKTFYVLPNDDTLRVEAFEYYH

SEQ ID NO: 16890 - protein, 25 aa, synthetic construct
  REGION 1..25: note = Description of Artificial Sequence: Synthetic peptide
NSHEGKTFYVLPNDDTLRVEAFEYY

SEQ ID NO: 16891 - protein, 25 aa, synthetic construct
  REGION 1..25: note = Description of Artificial Sequence: Synthetic peptide
VAYESLRPDTRYVLMDGSIIQFPNT

SEQ ID NO: 16892 - protein, 25 aa, synthetic construct
  REGION 1..25: note = Description of Artificial Sequence: Synthetic peptide
ATLQAIASEFSSLPSYAAFATAQEA

SEQ ID NO: 16893 - protein, 25 aa, synthetic construct
  REGION 1..25: note = Description of Artificial Sequence: Synthetic peptide
NLDSCKRVLNVVCKTCGQQQTTLKG

SEQ ID NO: 16894 - protein, 25 aa, synthetic construct
  REGION 1..25: note = Description of Artificial Sequence: Synthetic peptide
QHANLDSCKRVLNVVCKTCGQQQTT

SEQ ID NO: 16895 - protein, 25 aa, synthetic construct
  REGION 1..25: note = Description of Artificial Sequence: Synthetic peptide
LDSCKRVLNVVCKTCGQQQTTLKGV

SEQ ID NO: 16896 - protein, 25 aa, synthetic construct
  REGION 1..25: note = Description of Artificial Sequence: Synthetic peptide
ANLDSCKRVLNVVCKTCGQQQTTLK

SEQ ID NO: 16897 - protein, 25 aa, synthetic construct
  REGION 1..25: note = Description of Artificial Sequence: Synthetic peptide
HANLDSCKRVLNVVCKTCGQQQTTL

SEQ ID NO: 16898 - protein, 25 aa, synthetic construct
  REGION 1..25: note = Description of Artificial Sequence: Synthetic peptide
LNPNYEDLLIRKSNHNFLVQAGNVQ

SEQ ID NO: 16899 - protein, 25 aa, synthetic construct
  REGION 1..25: note = Description of Artificial Sequence: Synthetic peptide
CAKEIKESVQTFFKLVNKFLALCAD

SEQ ID NO: 16900 - protein, 25 aa, synthetic construct
  REGION 1..25: note = Description of Artificial Sequence: Synthetic peptide
DTEKYCALAPNMMVTNNTFTLKGGA

SEQ ID NO: 16901 - protein, 25 aa, synthetic construct
  REGION 1..25: note = Description of Artificial Sequence: Synthetic peptide
LTPVVQTIEVNSFSGYLKLTDNVYI

SEQ ID NO: 16902 - protein, 25 aa, synthetic construct
  REGION 1..25: note = Description of Artificial Sequence: Synthetic peptide
ELTPVVQTIEVNSFSGYLKLTDNVY

SEQ ID NO: 16903 - protein, 25 aa, synthetic construct
  REGION 1..25: note = Description of Artificial Sequence: Synthetic peptide
VYDDGARRVWTLMNVLTLVYKVYYG

SEQ ID NO: 16904 - protein, 25 aa, synthetic construct
  REGION 1..25: note = Description of Artificial Sequence: Synthetic peptide
YDDGARRVWTLMNVLTLVYKVYYGN

SEQ ID NO: 16905 - protein, 25 aa, synthetic construct
  REGION 1..25: note = Description of Artificial Sequence: Synthetic peptide
DDGARRVWTLMNVLTLVYKVYYGNA

SEQ ID NO: 16906 - protein, 25 aa, synthetic construct
  REGION 1..25: note = Description of Artificial Sequence: Synthetic peptide
PNTYLEGSVRVVTTFDSEYCRHGTC

SEQ ID NO: 16907 - protein, 25 aa, synthetic construct
  REGION 1..25: note = Description of Artificial Sequence: Synthetic peptide
TYLEGSVRVVTTFDSEYCRHGTCER

SEQ ID NO: 16908 - protein, 25 aa, synthetic construct
  REGION 1..25: note = Description of Artificial Sequence: Synthetic peptide
LEGSVRVVTTFDSEYCRHGTCERSE

SEQ ID NO: 16909 - protein, 25 aa, synthetic construct
  REGION 1..25: note = Description of Artificial Sequence: Synthetic peptide
NTYLEGSVRVVTTFDSEYCRHGTCE

SEQ ID NO: 16910 - protein, 25 aa, synthetic construct
  REGION 1..25: note = Description of Artificial Sequence: Synthetic peptide
YLEGSVRVVTTFDSEYCRHGTCERS

SEQ ID NO: 16911 - protein, 25 aa, synthetic construct
  REGION 1..25: note = Description of Artificial Sequence: Synthetic peptide
DYLASGGQPITNCVKMLCTHTGTGQ

SEQ ID NO: 16912 - protein, 25 aa, synthetic construct
  REGION 1..25: note = Description of Artificial Sequence: Synthetic peptide
VYLAVFDKNLYDKLVSSFLEMKSEK

SEQ ID NO: 16913 - protein, 25 aa, synthetic construct
  REGION 1..25: note = Description of Artificial Sequence: Synthetic peptide
IIQFPNTYLEGSVRVVTTFDSEYCR

SEQ ID NO: 16914 - protein, 25 aa, synthetic construct
  REGION 1..25: note = Description of Artificial Sequence: Synthetic peptide
QEGVLTAVVIPTKKAGGTTEMLAKA

SEQ ID NO: 16915 - protein, 25 aa, synthetic construct
  REGION 1..25: note = Description of Artificial Sequence: Synthetic peptide
VQEGVLTAVVIPTKKAGGTTEMLAK

SEQ ID NO: 16916 - protein, 25 aa, synthetic construct
  REGION 1..25: note = Description of Artificial Sequence: Synthetic peptide
VVQEGVLTAVVIPTKKAGGTTEMLA

SEQ ID NO: 16917 - protein, 25 aa, synthetic construct
  REGION 1..25: note = Description of Artificial Sequence: Synthetic peptide
SGGQPITNCVKMLCTHTGTGQAITV

SEQ ID NO: 16918 - protein, 25 aa, synthetic construct
  REGION 1..25: note = Description of Artificial Sequence: Synthetic peptide
EMELTPVVQTIEVNSFSGYLKLTDN

SEQ ID NO: 16919 - protein, 25 aa, synthetic construct
  REGION 1..25: note = Description of Artificial Sequence: Synthetic peptide
NGYTVEEAKTVLKKCKSAFYILPSI

SEQ ID NO: 16920 - protein, 25 aa, synthetic construct
  REGION 1..25: note = Description of Artificial Sequence: Synthetic peptide
FFASFYYVWKSYVHVVDGCNSSTCM

SEQ ID NO: 16921 - protein, 25 aa, synthetic construct
  REGION 1..25: note = Description of Artificial Sequence: Synthetic peptide
FASFYYVWKSYVHVVDGCNSSTCMM

SEQ ID NO: 16922 - protein, 25 aa, synthetic construct
  REGION 1..25: note = Description of Artificial Sequence: Synthetic peptide
MYIFFASFYYVWKSYVHVVDGCNSS

SEQ ID NO: 16923 - protein, 25 aa, synthetic construct
  REGION 1..25: note = Description of Artificial Sequence: Synthetic peptide
IFFASFYYVWKSYVHVVDGCNSSTC

SEQ ID NO: 16924 - protein, 25 aa, synthetic construct
  REGION 1..25: note = Description of Artificial Sequence: Synthetic peptide
YIFFASFYYVWKSYVHVVDGCNSST

SEQ ID NO: 16925 - protein, 25 aa, synthetic construct
  REGION 1..25: note = Description of Artificial Sequence: Synthetic peptide
TVEEAKTVLKKCKSAFYILPSIISN

SEQ ID NO: 16926 - protein, 25 aa, synthetic construct
  REGION 1..25: note = Description of Artificial Sequence: Synthetic peptide
MVRMYIFFASFYYVWKSYVHVVDGC

SEQ ID NO: 16927 - protein, 25 aa, synthetic construct
  REGION 1..25: note = Description of Artificial Sequence: Synthetic peptide
IAYIICISTKHFYWFFSNYLKRRVV

SEQ ID NO: 16928 - protein, 25 aa, synthetic construct
  REGION 1..25: note = Description of Artificial Sequence: Synthetic peptide
DTTEAFEKMVSLLSVLLSMQGAVDI

SEQ ID NO: 16929 - protein, 25 aa, synthetic construct
  REGION 1..25: note = Description of Artificial Sequence: Synthetic peptide
TSAMQTMLFTMLRKLDNDALNNIIN

SEQ ID NO: 16930 - protein, 25 aa, synthetic construct
  REGION 1..25: note = Description of Artificial Sequence: Synthetic peptide
KSVGKFCLEASFNYLKSPNFSKLIN

SEQ ID NO: 16931 - protein, 25 aa, synthetic construct
  REGION 1..25: note = Description of Artificial Sequence: Synthetic peptide
VKSVGKFCLEASFNYLKSPNFSKLI

SEQ ID NO: 16932 - protein, 25 aa, synthetic construct
  REGION 1..25: note = Description of Artificial Sequence: Synthetic peptide
TVKSVGKFCLEASFNYLKSPNFSKL

SEQ ID NO: 16933 - protein, 25 aa, synthetic construct
  REGION 1..25: note = Description of Artificial Sequence: Synthetic peptide
NTVKSVGKFCLEASFNYLKSPNFSK

SEQ ID NO: 16934 - protein, 25 aa, synthetic construct
  REGION 1..25: note = Description of Artificial Sequence: Synthetic peptide
LMLLEIKDTEKYCALAPNMMVTNNT

SEQ ID NO: 16935 - protein, 25 aa, synthetic construct
  REGION 1..25: note = Description of Artificial Sequence: Synthetic peptide
MLLEIKDTEKYCALAPNMMVTNNTF

SEQ ID NO: 16936 - protein, 25 aa, synthetic construct
  REGION 1..25: note = Description of Artificial Sequence: Synthetic peptide
LITPVHVMSKHTDFSSEIIGYKAID

SEQ ID NO: 16937 - protein, 25 aa, synthetic construct
  REGION 1..25: note = Description of Artificial Sequence: Synthetic peptide
DQAISMWALIISVTSNYSGVVTTVM

SEQ ID NO: 16938 - protein, 25 aa, synthetic construct
  REGION 1..25: note = Description of Artificial Sequence: Synthetic peptide
AISMWALIISVTSNYSGVVTTVMFL

SEQ ID NO: 16939 - protein, 25 aa, synthetic construct
  REGION 1..25: note = Description of Artificial Sequence: Synthetic peptide
SMWALIISVTSNYSGVVTTVMFLAR

SEQ ID NO: 16940 - protein, 25 aa, synthetic construct
  REGION 1..25: note = Description of Artificial Sequence: Synthetic peptide
ISMWALIISVTSNYSGVVTTVMFLA

SEQ ID NO: 16941 - protein, 25 aa, synthetic construct
  REGION 1..25: note = Description of Artificial Sequence: Synthetic peptide
QAISMWALIISVTSNYSGVVTTVMF

SEQ ID NO: 16942 - protein, 25 aa, synthetic construct
  REGION 1..25: note = Description of Artificial Sequence: Synthetic peptide
TPVHVMSKHTDFSSEIIGYKAIDGG

SEQ ID NO: 16943 - protein, 25 aa, synthetic construct
  REGION 1..25: note = Description of Artificial Sequence: Synthetic peptide
TKGGRFVLALLSDLQDLKWARFPKS

SEQ ID NO: 16944 - protein, 25 aa, synthetic construct
  REGION 1..25: note = Description of Artificial Sequence: Synthetic peptide
TTKGGRFVLALLSDLQDLKWARFPK

SEQ ID NO: 16945 - protein, 25 aa, synthetic construct
  REGION 1..25: note = Description of Artificial Sequence: Synthetic peptide
PKCDRAMPNMLRIMASLVLARKHTT

SEQ ID NO: 16946 - protein, 25 aa, synthetic construct
  REGION 1..25: note = Description of Artificial Sequence: Synthetic peptide
YPKCDRAMPNMLRIMASLVLARKHT

SEQ ID NO: 16947 - protein, 25 aa, synthetic construct
  REGION 1..25: note = Description of Artificial Sequence: Synthetic peptide
DIKDLPKEITVATSRTLSYYKLGAS

SEQ ID NO: 16948 - protein, 25 aa, synthetic construct
  REGION 1..25: note = Description of Artificial Sequence: Synthetic peptide
IKDLPKEITVATSRTLSYYKLGASQ

SEQ ID NO: 16949 - protein, 25 aa, synthetic construct
  REGION 1..25: note = Description of Artificial Sequence: Synthetic peptide
CDIKDLPKEITVATSRTLSYYKLGA

SEQ ID NO: 16950 - protein, 25 aa, synthetic construct
  REGION 1..25: note = Description of Artificial Sequence: Synthetic peptide
AVFQSASKIITLKKRWQLALSKGVH

SEQ ID NO: 16951 - protein, 25 aa, synthetic construct
  REGION 1..25: note = Description of Artificial Sequence: Synthetic peptide
FQSASKIITLKKRWQLALSKGVHFV

SEQ ID NO: 16952 - protein, 25 aa, synthetic construct
  REGION 1..25: note = Description of Artificial Sequence: Synthetic peptide
VFQSASKIITLKKRWQLALSKGVHF

SEQ ID NO: 16953 - protein, 25 aa, synthetic construct
  REGION 1..25: note = Description of Artificial Sequence: Synthetic peptide
CYTPSKLIEYTDFATSACVLAAECT

SEQ ID NO: 16954 - protein, 25 aa, synthetic construct
  REGION 1..25: note = Description of Artificial Sequence: Synthetic peptide
SAFVETVKGLDYKAFKQIVESCGNF

SEQ ID NO: 16955 - protein, 25 aa, synthetic construct
  REGION 1..25: note = Description of Artificial Sequence: Synthetic peptide
RAMPNMLRIMASLVLARKHTTCCSL

SEQ ID NO: 16956 - protein, 25 aa, synthetic construct
  REGION 1..25: note = Description of Artificial Sequence: Synthetic peptide
CDRAMPNMLRIMASLVLARKHTTCC

SEQ ID NO: 16957 - protein, 25 aa, synthetic construct
  REGION 1..25: note = Description of Artificial Sequence: Synthetic peptide
DRAMPNMLRIMASLVLARKHTTCCS

SEQ ID NO: 16958 - protein, 25 aa, synthetic construct
  REGION 1..25: note = Description of Artificial Sequence: Synthetic peptide
KCDRAMPNMLRIMASLVLARKHTTC

SEQ ID NO: 16959 - protein, 25 aa, synthetic construct
  REGION 1..25: note = Description of Artificial Sequence: Synthetic peptide
YPGQGLNGYTVEEAKTVLKKCKSAF

SEQ ID NO: 16960 - protein, 25 aa, synthetic construct
  REGION 1..25: note = Description of Artificial Sequence: Synthetic peptide
TYPGQGLNGYTVEEAKTVLKKCKSA

SEQ ID NO: 16961 - protein, 25 aa, synthetic construct
  REGION 1..25: note = Description of Artificial Sequence: Synthetic peptide
KDLPKEITVATSRTLSYYKLGASQR

SEQ ID NO: 16962 - protein, 25 aa, synthetic construct
  REGION 1..25: note = Description of Artificial Sequence: Synthetic peptide
EVGFVVPGLPGTILRTTNGDFLHFL

SEQ ID NO: 16963 - protein, 25 aa, synthetic construct
  REGION 1..25: note = Description of Artificial Sequence: Synthetic peptide
WEIVKFISTCACEIVGGQIVTCAKE

SEQ ID NO: 16964 - protein, 25 aa, synthetic construct
  REGION 1..25: note = Description of Artificial Sequence: Synthetic peptide
TVLSFCAFAVDAAKAYKDYLASGGQ

SEQ ID NO: 16965 - protein, 25 aa, synthetic construct
  REGION 1..25: note = Description of Artificial Sequence: Synthetic peptide
SLREVRTIKVFTTVDNINLHTQVVD

SEQ ID NO: 16966 - protein, 25 aa, synthetic construct
  REGION 1..25: note = Description of Artificial Sequence: Synthetic peptide
STFNVPMEKLKTLVATAEAELAKNV

SEQ ID NO: 16967 - protein, 25 aa, synthetic construct
  REGION 1..25: note = Description of Artificial Sequence: Synthetic peptide
SSTFNVPMEKLKTLVATAEAELAKN

SEQ ID NO: 16968 - protein, 25 aa, synthetic construct
  REGION 1..25: note = Description of Artificial Sequence: Synthetic peptide
SEFSSLPSYAAFATAQEAYEQAVAN

SEQ ID NO: 16969 - protein, 25 aa, synthetic construct
  REGION 1..25: note = Description of Artificial Sequence: Synthetic peptide
ASEFSSLPSYAAFATAQEAYEQAVA

SEQ ID NO: 16970 - protein, 25 aa, synthetic construct
  REGION 1..25: note = Description of Artificial Sequence: Synthetic peptide
VPLNIIPLTTAAKLMVVIPDYNTYK

SEQ ID NO: 16971 - protein, 25 aa, synthetic construct
  REGION 1..25: note = Description of Artificial Sequence: Synthetic peptide
LKTLVATAEAELAKNVSLDNVLSTF

SEQ ID NO: 16972 - protein, 25 aa, synthetic construct
  REGION 1..25: note = Description of Artificial Sequence: Synthetic peptide
PMEKLKTLVATAEAELAKNVSLDNV

SEQ ID NO: 16973 - protein, 25 aa, synthetic construct
  REGION 1..25: note = Description of Artificial Sequence: Synthetic peptide
NVPMEKLKTLVATAEAELAKNVSLD

SEQ ID NO: 16974 - protein, 25 aa, synthetic construct
  REGION 1..25: note = Description of Artificial Sequence: Synthetic peptide
MEKLKTLVATAEAELAKNVSLDNVL

SEQ ID NO: 16975 - protein, 25 aa, synthetic construct
  REGION 1..25: note = Description of Artificial Sequence: Synthetic peptide
VPMEKLKTLVATAEAELAKNVSLDN

SEQ ID NO: 16976 - protein, 25 aa, synthetic construct
  REGION 1..25: note = Description of Artificial Sequence: Synthetic peptide
RAKVTSAMQTMLFTMLRKLDNDALN

SEQ ID NO: 16977 - protein, 25 aa, synthetic construct
  REGION 1..25: note = Description of Artificial Sequence: Synthetic peptide
AKVTSAMQTMLFTMLRKLDNDALNN

SEQ ID NO: 16978 - protein, 25 aa, synthetic construct
  REGION 1..25: note = Description of Artificial Sequence: Synthetic peptide
KVTSAMQTMLFTMLRKLDNDALNNI

SEQ ID NO: 16979 - protein, 25 aa, synthetic construct
  REGION 1..25: note = Description of Artificial Sequence: Synthetic peptide
VTSAMQTMLFTMLRKLDNDALNNII

SEQ ID NO: 16980 - protein, 25 aa, synthetic construct
  REGION 1..25: note = Description of Artificial Sequence: Synthetic peptide
SSLPSYAAFATAQEAYEQAVANGDS

SEQ ID NO: 16981 - protein, 25 aa, synthetic construct
  REGION 1..25: note = Description of Artificial Sequence: Synthetic peptide
LIWNVKDFMSLSEQLRKQIRSAAKK

SEQ ID NO: 16982 - protein, 25 aa, synthetic construct
  REGION 1..25: note = Description of Artificial Sequence: Synthetic peptide
VGFVVPGLPGTILRTTNGDFLHFLP

SEQ ID NO: 16983 - protein, 25 aa, synthetic construct
  REGION 1..25: note = Description of Artificial Sequence: Synthetic peptide
TPFDVVRQCSGVTFQSAVKRTIKGT

SEQ ID NO: 16984 - protein, 25 aa, synthetic construct
  REGION 1..25: note = Description of Artificial Sequence: Synthetic peptide
GECPNFVFPLNSIIKTIQPRVEKKK

SEQ ID NO: 16985 - protein, 25 aa, synthetic construct
  REGION 1..25: note = Description of Artificial Sequence: Synthetic peptide
DAAKAYKDYLASGGQPITNCVKMLC

SEQ ID NO: 16986 - protein, 25 aa, synthetic construct
  REGION 1..25: note = Description of Artificial Sequence: Synthetic peptide
VVYCPRHVICTSEDMLNPNYEDLLI

SEQ ID NO: 16987 - protein, 25 aa, synthetic construct
  REGION 1..25: note = Description of Artificial Sequence: Synthetic peptide
DVVYCPRHVICTSEDMLNPNYEDLL

SEQ ID NO: 16988 - protein, 25 aa, synthetic construct
  REGION 1..25: note = Description of Artificial Sequence: Synthetic peptide
RKQDDKKIKACVEEVTTTLEETKFL

SEQ ID NO: 16989 - protein, 25 aa, synthetic construct
  REGION 1..25: note = Description of Artificial Sequence: Synthetic peptide
DFLHFLPRVFSAVGNICYTPSKLIE

SEQ ID NO: 16990 - protein, 25 aa, synthetic construct
  REGION 1..25: note = Description of Artificial Sequence: Synthetic peptide
LSLREVRTIKVFTTVDNINLHTQVV

SEQ ID NO: 16991 - protein, 25 aa, synthetic construct
  REGION 1..25: note = Description of Artificial Sequence: Synthetic peptide
QTFFKLVNKFLALCADSIIIGGAKL

SEQ ID NO: 16992 - protein, 25 aa, synthetic construct
  REGION 1..25: note = Description of Artificial Sequence: Synthetic peptide
RPDTRYVLMDGSIIQFPNTYLEGSV

SEQ ID NO: 16993 - protein, 25 aa, synthetic construct
  REGION 1..25: note = Description of Artificial Sequence: Synthetic peptide
ASAVVLLILMTARTVYDDGARRVWT

SEQ ID NO: 16994 - protein, 25 aa, synthetic construct
  REGION 1..25: note = Description of Artificial Sequence: Synthetic peptide
SAVVLLILMTARTVYDDGARRVWTL

SEQ ID NO: 16995 - protein, 25 aa, synthetic construct
  REGION 1..25: note = Description of Artificial Sequence: Synthetic peptide
AVVLLILMTARTVYDDGARRVWTLM

SEQ ID NO: 16996 - protein, 25 aa, synthetic construct
  REGION 1..25: note = Description of Artificial Sequence: Synthetic peptide
LAKNVSLDNVLSTFISAARQGFVDS

SEQ ID NO: 16997 - protein, 25 aa, synthetic construct
  REGION 1..25: note = Description of Artificial Sequence: Synthetic peptide
FDNLKTLLSLREVRTIKVFTTVDNI

SEQ ID NO: 16998 - protein, 25 aa, synthetic construct
  REGION 1..25: note = Description of Artificial Sequence: Synthetic peptide
TFDNLKTLLSLREVRTIKVFTTVDN

SEQ ID NO: 16999 - protein, 25 aa, synthetic construct
  REGION 1..25: note = Description of Artificial Sequence: Synthetic peptide
NPNYEDLLIRKSNHNFLVQAGNVQL

SEQ ID NO: 17000 - protein, 25 aa, synthetic construct
  REGION 1..25: note = Description of Artificial Sequence: Synthetic peptide
GLPGTILRTTNGDFLHFLPRVFSAV

SEQ ID NO: 17001 - protein, 25 aa, synthetic construct
  REGION 1..25: note = Description of Artificial Sequence: Synthetic peptide
ETSNSFDVLKSEDAQGMDNLACEDL

SEQ ID NO: 17002 - protein, 25 aa, synthetic construct
  REGION 1..25: note = Description of Artificial Sequence: Synthetic peptide
GEVITFDNLKTLLSLREVRTIKVFT

SEQ ID NO: 17003 - protein, 25 aa, synthetic construct
  REGION 1..25: note = Description of Artificial Sequence: Synthetic peptide
PTDNYITTYPGQGLNGYTVEEAKTV

SEQ ID NO: 17004 - protein, 25 aa, synthetic construct
  REGION 1..25: note = Description of Artificial Sequence: Synthetic peptide
SVGKFCLEASFNYLKSPNFSKLINI

SEQ ID NO: 17005 - protein, 25 aa, synthetic construct
  REGION 1..25: note = Description of Artificial Sequence: Synthetic peptide
VGKFCLEASFNYLKSPNFSKLINII

SEQ ID NO: 17006 - protein, 25 aa, synthetic construct
  REGION 1..25: note = Description of Artificial Sequence: Synthetic peptide
IQFPNTYLEGSVRVVTTFDSEYCRH

SEQ ID NO: 17007 - protein, 25 aa, synthetic construct
  REGION 1..25: note = Description of Artificial Sequence: Synthetic peptide
QFPNTYLEGSVRVVTTFDSEYCRHG

SEQ ID NO: 17008 - protein, 25 aa, synthetic construct
  REGION 1..25: note = Description of Artificial Sequence: Synthetic peptide
FPNTYLEGSVRVVTTFDSEYCRHGT

SEQ ID NO: 17009 - protein, 25 aa, synthetic construct
  REGION 1..25: note = Description of Artificial Sequence: Synthetic peptide
TGLLMPLKAPKEIIFLEGETLPTEV

SEQ ID NO: 17010 - protein, 25 aa, synthetic construct
  REGION 1..25: note = Description of Artificial Sequence: Synthetic peptide
GLLMPLKAPKEIIFLEGETLPTEVL

SEQ ID NO: 17011 - protein, 25 aa, synthetic construct
  REGION 1..25: note = Description of Artificial Sequence: Synthetic peptide
EVITFDNLKTLLSLREVRTIKVFTT

SEQ ID NO: 17012 - protein, 25 aa, synthetic construct
  REGION 1..25: note = Description of Artificial Sequence: Synthetic peptide
VITFDNLKTLLSLREVRTIKVFTTV

SEQ ID NO: 17013 - protein, 25 aa, synthetic construct
  REGION 1..25: note = Description of Artificial Sequence: Synthetic peptide
ITFDNLKTLLSLREVRTIKVFTTVD

SEQ ID NO: 17014 - protein, 25 aa, synthetic construct
  REGION 1..25: note = Description of Artificial Sequence: Synthetic peptide
HNSHEGKTFYVLPNDDTLRVEAFEY

SEQ ID NO: 17015 - protein, 25 aa, synthetic construct
  REGION 1..25: note = Description of Artificial Sequence: Synthetic peptide
RSEKSYELQTPFEIKLAKKFDTFNG

SEQ ID NO: 17016 - protein, 25 aa, synthetic construct
  REGION 1..25: note = Description of Artificial Sequence: Synthetic peptide
GDSEVVLKKLKKSLNVAKSEFDRDA

SEQ ID NO: 17017 - protein, 25 aa, synthetic construct
  REGION 1..25: note = Description of Artificial Sequence: Synthetic peptide
LSHFVNLDNLRANNTKGSLPINVIV

SEQ ID NO: 17018 - protein, 25 aa, synthetic construct
  REGION 1..25: note = Description of Artificial Sequence: Synthetic peptide
EIKDTEKYCALAPNMMVTNNTFTLK

SEQ ID NO: 17019 - protein, 25 aa, synthetic construct
  REGION 1..25: note = Description of Artificial Sequence: Synthetic peptide
IKDTEKYCALAPNMMVTNNTFTLKG

SEQ ID NO: 17020 - protein, 25 aa, synthetic construct
  REGION 1..25: note = Description of Artificial Sequence: Synthetic peptide
GGQIVTCAKEIKESVQTFFKLVNKF

SEQ ID NO: 17021 - protein, 25 aa, synthetic construct
  REGION 1..25: note = Description of Artificial Sequence: Synthetic peptide
KAGQKTYERHSLSHFVNLDNLRANN

SEQ ID NO: 17022 - protein, 25 aa, synthetic construct
  REGION 1..25: note = Description of Artificial Sequence: Synthetic peptide
TLQAIASEFSSLPSYAAFATAQEAY

SEQ ID NO: 17023 - protein, 25 aa, synthetic construct
  REGION 1..25: note = Description of Artificial Sequence: Synthetic peptide
NIFGTVYEKLKPVLDWLEEKFKEGV

SEQ ID NO: 17024 - protein, 25 aa, synthetic construct
  REGION 1..25: note = Description of Artificial Sequence: Synthetic peptide
FGTVYEKLKPVLDWLEEKFKEGVEF

SEQ ID NO: 17025 - protein, 25 aa, synthetic construct
  REGION 1..25: note = Description of Artificial Sequence: Synthetic peptide
KDTEKYCALAPNMMVTNNTFTLKGG

SEQ ID NO: 17026 - protein, 25 aa, synthetic construct
  REGION 1..25: note = Description of Artificial Sequence: Synthetic peptide
ELQTPFEIKLAKKFDTFNGECPNFV

SEQ ID NO: 17027 - protein, 25 aa, synthetic construct
  REGION 1..25: note = Description of Artificial Sequence: Synthetic peptide
SYELQTPFEIKLAKKFDTFNGECPN

SEQ ID NO: 17028 - protein, 25 aa, synthetic construct
  REGION 1..25: note = Description of Artificial Sequence: Synthetic peptide
YELQTPFEIKLAKKFDTFNGECPNF

SEQ ID NO: 17029 - protein, 25 aa, synthetic construct
  REGION 1..25: note = Description of Artificial Sequence: Synthetic peptide
LQTPFEIKLAKKFDTFNGECPNFVF

SEQ ID NO: 17030 - protein, 25 aa, synthetic construct
  REGION 1..25: note = Description of Artificial Sequence: Synthetic peptide
MELTPVVQTIEVNSFSGYLKLTDNV

SEQ ID NO: 17031 - protein, 25 aa, synthetic construct
  REGION 1..25: note = Description of Artificial Sequence: Synthetic peptide
VGDVVQEGVLTAVVIPTKKAGGTTE

SEQ ID NO: 17032 - protein, 25 aa, synthetic construct
  REGION 1..25: note = Description of Artificial Sequence: Synthetic peptide
DVVQEGVLTAVVIPTKKAGGTTEML

SEQ ID NO: 17033 - protein, 25 aa, synthetic construct
  REGION 1..25: note = Description of Artificial Sequence: Synthetic peptide
GDVVQEGVLTAVVIPTKKAGGTTEM

SEQ ID NO: 17034 - protein, 25 aa, synthetic construct
  REGION 1..25: note = Description of Artificial Sequence: Synthetic peptide
ASGGQPITNCVKMLCTHTGTGQAIT

SEQ ID NO: 17035 - protein, 25 aa, synthetic construct
  REGION 1..25: note = Description of Artificial Sequence: Synthetic peptide
NLGETFVTHSKGLYRKCVKSREETG

SEQ ID NO: 17036 - protein, 25 aa, synthetic construct
  REGION 1..25: note = Description of Artificial Sequence: Synthetic peptide
AVFDKNLYDKLVSSFLEMKSEKQVE

SEQ ID NO: 17037 - protein, 25 aa, synthetic construct
  REGION 1..25: note = Description of Artificial Sequence: Synthetic peptide
ASFNYLKSPNFSKLINIIIWFLLLS

SEQ ID NO: 17038 - protein, 25 aa, synthetic construct
  REGION 1..25: note = Description of Artificial Sequence: Synthetic peptide
VFLFVAAIFYLITPVHVMSKHTDFS

SEQ ID NO: 17039 - protein, 25 aa, synthetic construct
  REGION 1..25: note = Description of Artificial Sequence: Synthetic peptide
FLFVAAIFYLITPVHVMSKHTDFSS

SEQ ID NO: 17040 - protein, 25 aa, synthetic construct
  REGION 1..25: note = Description of Artificial Sequence: Synthetic peptide
FTCASEYTGNYQCGHYKHITSKETL

SEQ ID NO: 17041 - protein, 25 aa, synthetic construct
  REGION 1..25: note = Description of Artificial Sequence: Synthetic peptide
STSAFVETVKGLDYKAFKQIVESCG

SEQ ID NO: 17042 - protein, 25 aa, synthetic construct
  REGION 1..25: note = Description of Artificial Sequence: Synthetic peptide
TSAFVETVKGLDYKAFKQIVESCGN

SEQ ID NO: 17043 - protein, 25 aa, synthetic construct
  REGION 1..25: note = Description of Artificial Sequence: Synthetic peptide
TSQWLTNIFGTVYEKLKPVLDWLEE

SEQ ID NO: 17044 - protein, 25 aa, synthetic construct
  REGION 1..25: note = Description of Artificial Sequence: Synthetic peptide
GWEIVKFISTCACEIVGGQIVTCAK

SEQ ID NO: 17045 - protein, 25 aa, synthetic construct
  REGION 1..25: note = Description of Artificial Sequence: Synthetic peptide
TNIFGTVYEKLKPVLDWLEEKFKEG

SEQ ID NO: 17046 - protein, 25 aa, synthetic construct
  REGION 1..25: note = Description of Artificial Sequence: Synthetic peptide
LSFCAFAVDAAKAYKDYLASGGQPI

SEQ ID NO: 17047 - protein, 25 aa, synthetic construct
  REGION 1..25: note = Description of Artificial Sequence: Synthetic peptide
VLSFCAFAVDAAKAYKDYLASGGQP

SEQ ID NO: 17048 - protein, 25 aa, synthetic construct
  REGION 1..25: note = Description of Artificial Sequence: Synthetic peptide
IVKFISTCACEIVGGQIVTCAKEIK

SEQ ID NO: 17049 - protein, 25 aa, synthetic construct
  REGION 1..25: note = Description of Artificial Sequence: Synthetic peptide
FNVPMEKLKTLVATAEAELAKNVSL

SEQ ID NO: 17050 - protein, 25 aa, synthetic construct
  REGION 1..25: note = Description of Artificial Sequence: Synthetic peptide
TFNVPMEKLKTLVATAEAELAKNVS

SEQ ID NO: 17051 - protein, 25 aa, synthetic construct
  REGION 1..25: note = Description of Artificial Sequence: Synthetic peptide
PTTFHLDGEVITFDNLKTLLSLREV

SEQ ID NO: 17052 - protein, 25 aa, synthetic construct
  REGION 1..25: note = Description of Artificial Sequence: Synthetic peptide
AIILASFSASTSAFVETVKGLDYKA

SEQ ID NO: 17053 - protein, 25 aa, synthetic construct
  REGION 1..25: note = Description of Artificial Sequence: Synthetic peptide
IAIILASFSASTSAFVETVKGLDYK

SEQ ID NO: 17054 - protein, 25 aa, synthetic construct
  REGION 1..25: note = Description of Artificial Sequence: Synthetic peptide
EIVKFISTCACEIVGGQIVTCAKEI

SEQ ID NO: 17055 - protein, 25 aa, synthetic construct
  REGION 1..25: note = Description of Artificial Sequence: Synthetic peptide
TSSSKTPEEHFIETISLAGSYKDWS

SEQ ID NO: 17056 - protein, 25 aa, synthetic construct
  REGION 1..25: note = Description of Artificial Sequence: Synthetic peptide
KTPEEHFIETISLAGSYKDWSYSGQ

SEQ ID NO: 17057 - protein, 25 aa, synthetic construct
  REGION 1..25: note = Description of Artificial Sequence: Synthetic peptide
SSSKTPEEHFIETISLAGSYKDWSY

SEQ ID NO: 17058 - protein, 25 aa, synthetic construct
  REGION 1..25: note = Description of Artificial Sequence: Synthetic peptide
SKTPEEHFIETISLAGSYKDWSYSG

SEQ ID NO: 17059 - protein, 25 aa, synthetic construct
  REGION 1..25: note = Description of Artificial Sequence: Synthetic peptide
SSKTPEEHFIETISLAGSYKDWSYS

SEQ ID NO: 17060 - protein, 25 aa, synthetic construct
  REGION 1..25: note = Description of Artificial Sequence: Synthetic peptide
AYITGGVVQLTSQWLTNIFGTVYEK

SEQ ID NO: 17061 - protein, 25 aa, synthetic construct
  REGION 1..25: note = Description of Artificial Sequence: Synthetic peptide
ATNNLVVMAYITGGVVQLTSQWLTN

SEQ ID NO: 17062 - protein, 25 aa, synthetic construct
  REGION 1..25: note = Description of Artificial Sequence: Synthetic peptide
TNNLVVMAYITGGVVQLTSQWLTNI

SEQ ID NO: 17063 - protein, 25 aa, synthetic construct
  REGION 1..25: note = Description of Artificial Sequence: Synthetic peptide
LVVMAYITGGVVQLTSQWLTNIFGT

SEQ ID NO: 17064 - protein, 25 aa, synthetic construct
  REGION 1..25: note = Description of Artificial Sequence: Synthetic peptide
MAYITGGVVQLTSQWLTNIFGTVYE

SEQ ID NO: 17065 - protein, 25 aa, synthetic construct
  REGION 1..25: note = Description of Artificial Sequence: Synthetic peptide
YITGGVVQLTSQWLTNIFGTVYEKL

SEQ ID NO: 17066 - protein, 25 aa, synthetic construct
  REGION 1..25: note = Description of Artificial Sequence: Synthetic peptide
VMAYITGGVVQLTSQWLTNIFGTVY

SEQ ID NO: 17067 - protein, 25 aa, synthetic construct
  REGION 1..25: note = Description of Artificial Sequence: Synthetic peptide
VVMAYITGGVVQLTSQWLTNIFGTV

SEQ ID NO: 17068 - protein, 25 aa, synthetic construct
  REGION 1..25: note = Description of Artificial Sequence: Synthetic peptide
NLVVMAYITGGVVQLTSQWLTNIFG

SEQ ID NO: 17069 - protein, 25 aa, synthetic construct
  REGION 1..25: note = Description of Artificial Sequence: Synthetic peptide
NNLVVMAYITGGVVQLTSQWLTNIF

SEQ ID NO: 17070 - protein, 25 aa, synthetic construct
  REGION 1..25: note = Description of Artificial Sequence: Synthetic peptide
VVPGLPGTILRTTNGDFLHFLPRVF

SEQ ID NO: 17071 - protein, 25 aa, synthetic construct
  REGION 1..25: note = Description of Artificial Sequence: Synthetic peptide
GFVVPGLPGTILRTTNGDFLHFLPR

SEQ ID NO: 17072 - protein, 25 aa, synthetic construct
  REGION 1..25: note = Description of Artificial Sequence: Synthetic peptide
FVVPGLPGTILRTTNGDFLHFLPRV

SEQ ID NO: 17073 - protein, 25 aa, synthetic construct
  REGION 1..25: note = Description of Artificial Sequence: Synthetic peptide
VDAAKAYKDYLASGGQPITNCVKML

SEQ ID NO: 17074 - protein, 25 aa, synthetic construct
  REGION 1..25: note = Description of Artificial Sequence: Synthetic peptide
SLRPDTRYVLMDGSIIQFPNTYLEG

SEQ ID NO: 17075 - protein, 25 aa, synthetic construct
  REGION 1..25: note = Description of Artificial Sequence: Synthetic peptide
HYKHITSKETLYCIDGALLTKSSEY

SEQ ID NO: 17076 - protein, 25 aa, synthetic construct
  REGION 1..25: note = Description of Artificial Sequence: Synthetic peptide
SVQTFFKLVNKFLALCADSIIIGGA

SEQ ID NO: 17077 - protein, 25 aa, synthetic construct
  REGION 1..25: note = Description of Artificial Sequence: Synthetic peptide
YESLRPDTRYVLMDGSIIQFPNTYL

SEQ ID NO: 17078 - protein, 25 aa, synthetic construct
  REGION 1..25: note = Description of Artificial Sequence: Synthetic peptide
AYESLRPDTRYVLMDGSIIQFPNTY

SEQ ID NO: 17079 - protein, 25 aa, synthetic construct
  REGION 1..25: note = Description of Artificial Sequence: Synthetic peptide
ESLRPDTRYVLMDGSIIQFPNTYLE

SEQ ID NO: 17080 - protein, 25 aa, synthetic construct
  REGION 1..25: note = Description of Artificial Sequence: Synthetic peptide
ILLAKDTTEAFEKMVSLLSVLLSMQ

SEQ ID NO: 17081 - protein, 25 aa, synthetic construct
  REGION 1..25: note = Description of Artificial Sequence: Synthetic peptide
VPGLPGTILRTTNGDFLHFLPRVFS

SEQ ID NO: 17082 - protein, 25 aa, synthetic construct
  REGION 1..25: note = Description of Artificial Sequence: Synthetic peptide
VQTFFKLVNKFLALCADSIIIGGAK

SEQ ID NO: 17083 - protein, 25 aa, synthetic construct
  REGION 1..25: note = Description of Artificial Sequence: Synthetic peptide
DGEVITFDNLKTLLSLREVRTIKVF

SEQ ID NO: 17084 - protein, 25 aa, synthetic construct
  REGION 1..25: note = Description of Artificial Sequence: Synthetic peptide
VAKSHNIALIWNVKDFMSLSEQLRK

SEQ ID NO: 17085 - protein, 25 aa, synthetic construct
  REGION 1..25: note = Description of Artificial Sequence: Synthetic peptide
KFCLEASFNYLKSPNFSKLINIIIW

SEQ ID NO: 17086 - protein, 25 aa, synthetic construct
  REGION 1..25: note = Description of Artificial Sequence: Synthetic peptide
FCLEASFNYLKSPNFSKLINIIIWF

SEQ ID NO: 17087 - protein, 25 aa, synthetic construct
  REGION 1..25: note = Description of Artificial Sequence: Synthetic peptide
GKFCLEASFNYLKSPNFSKLINIII

SEQ ID NO: 17088 - protein, 25 aa, synthetic construct
  REGION 1..25: note = Description of Artificial Sequence: Synthetic peptide
VKFISTCACEIVGGQIVTCAKEIKE

SEQ ID NO: 17089 - protein, 25 aa, synthetic construct
  REGION 1..25: note = Description of Artificial Sequence: Synthetic peptide
TLGVYDYLVSTQEFRYMNSQGLLPP

SEQ ID NO: 17090 - protein, 25 aa, synthetic construct
  REGION 1..25: note = Description of Artificial Sequence: Synthetic peptide
VTKIKPHNSHEGKTFYVLPNDDTLR

SEQ ID NO: 17091 - protein, 25 aa, synthetic construct
  REGION 1..25: note = Description of Artificial Sequence: Synthetic peptide
YKDYLASGGQPITNCVKMLCTHTGT

SEQ ID NO: 17092 - protein, 25 aa, synthetic construct
  REGION 1..25: note = Description of Artificial Sequence: Synthetic peptide
NGDSEVVLKKLKKSLNVAKSEFDRD

SEQ ID NO: 17093 - protein, 25 aa, synthetic construct
  REGION 1..25: note = Description of Artificial Sequence: Synthetic peptide
ANGDSEVVLKKLKKSLNVAKSEFDR

SEQ ID NO: 17094 - protein, 25 aa, synthetic construct
  REGION 1..25: note = Description of Artificial Sequence: Synthetic peptide
VETSNSFDVLKSEDAQGMDNLACED

SEQ ID NO: 17095 - protein, 25 aa, synthetic construct
  REGION 1..25: note = Description of Artificial Sequence: Synthetic peptide
QTPFEIKLAKKFDTFNGECPNFVFP

SEQ ID NO: 17096 - protein, 25 aa, synthetic construct
  REGION 1..25: note = Description of Artificial Sequence: Synthetic peptide
TPFEIKLAKKFDTFNGECPNFVFPL

SEQ ID NO: 17097 - protein, 25 aa, synthetic construct
  REGION 1..25: note = Description of Artificial Sequence: Synthetic peptide
PGLPGTILRTTNGDFLHFLPRVFSA

SEQ ID NO: 17098 - protein, 25 aa, synthetic construct
  REGION 1..25: note = Description of Artificial Sequence: Synthetic peptide
SASTSAFVETVKGLDYKAFKQIVES

SEQ ID NO: 17099 - protein, 25 aa, synthetic construct
  REGION 1..25: note = Description of Artificial Sequence: Synthetic peptide
AGQKTYERHSLSHFVNLDNLRANNT

SEQ ID NO: 17100 - protein, 25 aa, synthetic construct
  REGION 1..25: note = Description of Artificial Sequence: Synthetic peptide
LLAKDTTEAFEKMVSLLSVLLSMQG

SEQ ID NO: 17101 - protein, 25 aa, synthetic construct
  REGION 1..25: note = Description of Artificial Sequence: Synthetic peptide
ETGLLMPLKAPKEIIFLEGETLPTE

SEQ ID NO: 17102 - protein, 25 aa, synthetic construct
  REGION 1..25: note = Description of Artificial Sequence: Synthetic peptide
VEEAKTVLKKCKSAFYILPSIISNE

SEQ ID NO: 17103 - protein, 25 aa, synthetic construct
  REGION 1..25: note = Description of Artificial Sequence: Synthetic peptide
WALIISVTSNYSGVVTTVMFLARGI

SEQ ID NO: 17104 - protein, 25 aa, synthetic construct
  REGION 1..25: note = Description of Artificial Sequence: Synthetic peptide
MWALIISVTSNYSGVVTTVMFLARG

SEQ ID NO: 17105 - protein, 25 aa, synthetic construct
  REGION 1..25: note = Description of Artificial Sequence: Synthetic peptide
SEKSYELQTPFEIKLAKKFDTFNGE

SEQ ID NO: 17106 - protein, 25 aa, synthetic construct
  REGION 1..25: note = Description of Artificial Sequence: Synthetic peptide
KPHNSHEGKTFYVLPNDDTLRVEAF

SEQ ID NO: 17107 - protein, 25 aa, synthetic construct
  REGION 1..25: note = Description of Artificial Sequence: Synthetic peptide
PHNSHEGKTFYVLPNDDTLRVEAFE

SEQ ID NO: 17108 - protein, 25 aa, synthetic construct
  REGION 1..25: note = Description of Artificial Sequence: Synthetic peptide
AFYILPSIISNEKQEILGTVSWNLR

SEQ ID NO: 17109 - protein, 25 aa, synthetic construct
  REGION 1..25: note = Description of Artificial Sequence: Synthetic peptide
FYILPSIISNEKQEILGTVSWNLRE

SEQ ID NO: 17110 - protein, 25 aa, synthetic construct
  REGION 1..25: note = Description of Artificial Sequence: Synthetic peptide
LEASFNYLKSPNFSKLINIIIWFLL

SEQ ID NO: 17111 - protein, 25 aa, synthetic construct
  REGION 1..25: note = Description of Artificial Sequence: Synthetic peptide
EASFNYLKSPNFSKLINIIIWFLLL

SEQ ID NO: 17112 - protein, 25 aa, synthetic construct
  REGION 1..25: note = Description of Artificial Sequence: Synthetic peptide
LQAIASEFSSLPSYAAFATAQEAYE

SEQ ID NO: 17113 - protein, 25 aa, synthetic construct
  REGION 1..25: note = Description of Artificial Sequence: Synthetic peptide
TCGTTTLNGLWLDDVVYCPRHVICT

SEQ ID NO: 17114 - protein, 25 aa, synthetic construct
  REGION 1..25: note = Description of Artificial Sequence: Synthetic peptide
KSYELQTPFEIKLAKKFDTFNGECP

SEQ ID NO: 17115 - protein, 25 aa, synthetic construct
  REGION 1..25: note = Description of Artificial Sequence: Synthetic peptide
EKSYELQTPFEIKLAKKFDTFNGEC

SEQ ID NO: 17116 - protein, 25 aa, synthetic construct
  REGION 1..25: note = Description of Artificial Sequence: Synthetic peptide
IFGTVYEKLKPVLDWLEEKFKEGVE

SEQ ID NO: 17117 - protein, 25 aa, synthetic construct
  REGION 1..25: note = Description of Artificial Sequence: Synthetic peptide
LASGGQPITNCVKMLCTHTGTGQAI

SEQ ID NO: 17118 - protein, 25 aa, synthetic construct
  REGION 1..25: note = Description of Artificial Sequence: Synthetic peptide
YLASGGQPITNCVKMLCTHTGTGQA

SEQ ID NO: 17119 - protein, 25 aa, synthetic construct
  REGION 1..25: note = Description of Artificial Sequence: Synthetic peptide
TPVVQTIEVNSFSGYLKLTDNVYIK

SEQ ID NO: 17120 - protein, 25 aa, synthetic construct
  REGION 1..25: note = Description of Artificial Sequence: Synthetic peptide
VAAIFYLITPVHVMSKHTDFSSEII

SEQ ID NO: 17121 - protein, 25 aa, synthetic construct
  REGION 1..25: note = Description of Artificial Sequence: Synthetic peptide
LFVAAIFYLITPVHVMSKHTDFSSE

SEQ ID NO: 17122 - protein, 25 aa, synthetic construct
  REGION 1..25: note = Description of Artificial Sequence: Synthetic peptide
AAIFYLITPVHVMSKHTDFSSEIIG

SEQ ID NO: 17123 - protein, 25 aa, synthetic construct
  REGION 1..25: note = Description of Artificial Sequence: Synthetic peptide
FVAAIFYLITPVHVMSKHTDFSSEI

SEQ ID NO: 17124 - protein, 25 aa, synthetic construct
  REGION 1..25: note = Description of Artificial Sequence: Synthetic peptide
TGGVVQLTSQWLTNIFGTVYEKLKP

SEQ ID NO: 17125 - protein, 25 aa, synthetic construct
  REGION 1..25: note = Description of Artificial Sequence: Synthetic peptide
QWLTNIFGTVYEKLKPVLDWLEEKF

SEQ ID NO: 17126 - protein, 25 aa, synthetic construct
  REGION 1..25: note = Description of Artificial Sequence: Synthetic peptide
SQWLTNIFGTVYEKLKPVLDWLEEK

SEQ ID NO: 17127 - protein, 25 aa, synthetic construct
  REGION 1..25: note = Description of Artificial Sequence: Synthetic peptide
PGQGLNGYTVEEAKTVLKKCKSAFY

SEQ ID NO: 17128 - protein, 25 aa, synthetic construct
  REGION 1..25: note = Description of Artificial Sequence: Synthetic peptide
ALIWNVKDFMSLSEQLRKQIRSAAK

SEQ ID NO: 17129 - protein, 25 aa, synthetic construct
  REGION 1..25: note = Description of Artificial Sequence: Synthetic peptide
IILASFSASTSAFVETVKGLDYKAF

SEQ ID NO: 17130 - protein, 25 aa, synthetic construct
  REGION 1..25: note = Description of Artificial Sequence: Synthetic peptide
DGWEIVKFISTCACEIVGGQIVTCA

SEQ ID NO: 17131 - protein, 25 aa, synthetic construct
  REGION 1..25: note = Description of Artificial Sequence: Synthetic peptide
RDGWEIVKFISTCACEIVGGQIVTC

SEQ ID NO: 17132 - protein, 25 aa, synthetic construct
  REGION 1..25: note = Description of Artificial Sequence: Synthetic peptide
VPTDNYITTYPGQGLNGYTVEEAKT

SEQ ID NO: 17133 - protein, 25 aa, synthetic construct
  REGION 1..25: note = Description of Artificial Sequence: Synthetic peptide
SFSASTSAFVETVKGLDYKAFKQIV

SEQ ID NO: 17134 - protein, 25 aa, synthetic construct
  REGION 1..25: note = Description of Artificial Sequence: Synthetic peptide
FSASTSAFVETVKGLDYKAFKQIVE

SEQ ID NO: 17135 - protein, 25 aa, synthetic construct
  REGION 1..25: note = Description of Artificial Sequence: Synthetic peptide
AIASEFSSLPSYAAFATAQEAYEQA

SEQ ID NO: 17136 - protein, 25 aa, synthetic construct
  REGION 1..25: note = Description of Artificial Sequence: Synthetic peptide
CLEASFNYLKSPNFSKLINIIIWFL

SEQ ID NO: 17137 - protein, 25 aa, synthetic construct
  REGION 1..25: note = Description of Artificial Sequence: Synthetic peptide
KDYLASGGQPITNCVKMLCTHTGTG

SEQ ID NO: 17138 - protein, 25 aa, synthetic construct
  REGION 1..25: note = Description of Artificial Sequence: Synthetic peptide
TKIKPHNSHEGKTFYVLPNDDTLRV

SEQ ID NO: 17139 - protein, 25 aa, synthetic construct
  REGION 1..25: note = Description of Artificial Sequence: Synthetic peptide
IKPHNSHEGKTFYVLPNDDTLRVEA

SEQ ID NO: 17140 - protein, 25 aa, synthetic construct
  REGION 1..25: note = Description of Artificial Sequence: Synthetic peptide
KIKPHNSHEGKTFYVLPNDDTLRVE

SEQ ID NO: 17141 - protein, 25 aa, synthetic construct
  REGION 1..25: note = Description of Artificial Sequence: Synthetic peptide
PVETSNSFDVLKSEDAQGMDNLACE

SEQ ID NO: 17142 - protein, 25 aa, synthetic construct
  REGION 1..25: note = Description of Artificial Sequence: Synthetic peptide
KPVETSNSFDVLKSEDAQGMDNLAC

SEQ ID NO: 17143 - protein, 25 aa, synthetic construct
  REGION 1..25: note = Description of Artificial Sequence: Synthetic peptide
WSTKPVETSNSFDVLKSEDAQGMDN

SEQ ID NO: 17144 - protein, 25 aa, synthetic construct
  REGION 1..25: note = Description of Artificial Sequence: Synthetic peptide
STKPVETSNSFDVLKSEDAQGMDNL

SEQ ID NO: 17145 - protein, 25 aa, synthetic construct
  REGION 1..25: note = Description of Artificial Sequence: Synthetic peptide
TKPVETSNSFDVLKSEDAQGMDNLA

SEQ ID NO: 17146 - protein, 25 aa, synthetic construct
  REGION 1..25: note = Description of Artificial Sequence: Synthetic peptide
GQKTYERHSLSHFVNLDNLRANNTK

SEQ ID NO: 17147 - protein, 25 aa, synthetic construct
  REGION 1..25: note = Description of Artificial Sequence: Synthetic peptide
AKDTTEAFEKMVSLLSVLLSMQGAV

SEQ ID NO: 17148 - protein, 25 aa, synthetic construct
  REGION 1..25: note = Description of Artificial Sequence: Synthetic peptide
KDTTEAFEKMVSLLSVLLSMQGAVD

SEQ ID NO: 17149 - protein, 25 aa, synthetic construct
  REGION 1..25: note = Description of Artificial Sequence: Synthetic peptide
LAKDTTEAFEKMVSLLSVLLSMQGA

SEQ ID NO: 17150 - protein, 25 aa, synthetic construct
  REGION 1..25: note = Description of Artificial Sequence: Synthetic peptide
LVSSFLEMKSEKQVEQKIAEIPKEE

SEQ ID NO: 17151 - protein, 25 aa, synthetic construct
  REGION 1..25: note = Description of Artificial Sequence: Synthetic peptide
TILRTTNGDFLHFLPRVFSAVGNIC

SEQ ID NO: 17152 - protein, 25 aa, synthetic construct
  REGION 1..25: note = Description of Artificial Sequence: Synthetic peptide
YILPSIISNEKQEILGTVSWNLREM

SEQ ID NO: 17153 - protein, 25 aa, synthetic construct
  REGION 1..25: note = Description of Artificial Sequence: Synthetic peptide
KEIKESVQTFFKLVNKFLALCADSI

SEQ ID NO: 17154 - protein, 25 aa, synthetic construct
  REGION 1..25: note = Description of Artificial Sequence: Synthetic peptide
AKEIKESVQTFFKLVNKFLALCADS

SEQ ID NO: 17155 - protein, 25 aa, synthetic construct
  REGION 1..25: note = Description of Artificial Sequence: Synthetic peptide
VFDKNLYDKLVSSFLEMKSEKQVEQ

SEQ ID NO: 17156 - protein, 25 aa, synthetic construct
  REGION 1..25: note = Description of Artificial Sequence: Synthetic peptide
KGVEAVMYMGTLSYEQFKKGVQIPC

SEQ ID NO: 17157 - protein, 25 aa, synthetic construct
  REGION 1..25: note = Description of Artificial Sequence: Synthetic peptide
TCASEYTGNYQCGHYKHITSKETLY

SEQ ID NO: 17158 - protein, 25 aa, synthetic construct
  REGION 1..25: note = Description of Artificial Sequence: Synthetic peptide
LKGVEAVMYMGTLSYEQFKKGVQIP

SEQ ID NO: 17159 - protein, 25 aa, synthetic construct
  REGION 1..25: note = Description of Artificial Sequence: Synthetic peptide
ITGGVVQLTSQWLTNIFGTVYEKLK

SEQ ID NO: 17160 - protein, 25 aa, synthetic construct
  REGION 1..25: note = Description of Artificial Sequence: Synthetic peptide
WLTNIFGTVYEKLKPVLDWLEEKFK

SEQ ID NO: 17161 - protein, 25 aa, synthetic construct
  REGION 1..25: note = Description of Artificial Sequence: Synthetic peptide
LTNIFGTVYEKLKPVLDWLEEKFKE

SEQ ID NO: 17162 - protein, 25 aa, synthetic construct
  REGION 1..25: note = Description of Artificial Sequence: Synthetic peptide
QTTLKGVEAVMYMGTLSYEQFKKGV

SEQ ID NO: 17163 - protein, 25 aa, synthetic construct
  REGION 1..25: note = Description of Artificial Sequence: Synthetic peptide
QQTTLKGVEAVMYMGTLSYEQFKKG

SEQ ID NO: 17164 - protein, 25 aa, synthetic construct
  REGION 1..25: note = Description of Artificial Sequence: Synthetic peptide
QQQTTLKGVEAVMYMGTLSYEQFKK

SEQ ID NO: 17165 - protein, 25 aa, synthetic construct
  REGION 1..25: note = Description of Artificial Sequence: Synthetic peptide
SFCAFAVDAAKAYKDYLASGGQPIT

SEQ ID NO: 17166 - protein, 25 aa, synthetic construct
  REGION 1..25: note = Description of Artificial Sequence: Synthetic peptide
IALIWNVKDFMSLSEQLRKQIRSAA

SEQ ID NO: 17167 - protein, 25 aa, synthetic construct
  REGION 1..25: note = Description of Artificial Sequence: Synthetic peptide
NIALIWNVKDFMSLSEQLRKQIRSA

SEQ ID NO: 17168 - protein, 25 aa, synthetic construct
  REGION 1..25: note = Description of Artificial Sequence: Synthetic peptide
IASEFSSLPSYAAFATAQEAYEQAV

SEQ ID NO: 17169 - protein, 25 aa, synthetic construct
  REGION 1..25: note = Description of Artificial Sequence: Synthetic peptide
AVDAAKAYKDYLASGGQPITNCVKM

SEQ ID NO: 17170 - protein, 25 aa, synthetic construct
  REGION 1..25: note = Description of Artificial Sequence: Synthetic peptide
GVEFLRDGWEIVKFISTCACEIVGG

SEQ ID NO: 17171 - protein, 25 aa, synthetic construct
  REGION 1..25: note = Description of Artificial Sequence: Synthetic peptide
EGVEFLRDGWEIVKFISTCACEIVG

SEQ ID NO: 17172 - protein, 25 aa, synthetic construct
  REGION 1..25: note = Description of Artificial Sequence: Synthetic peptide
KVPTDNYITTYPGQGLNGYTVEEAK

SEQ ID NO: 17173 - protein, 25 aa, synthetic construct
  REGION 1..25: note = Description of Artificial Sequence: Synthetic peptide
NGDFLHFLPRVFSAVGNICYTPSKL

SEQ ID NO: 17174 - protein, 25 aa, synthetic construct
  REGION 1..25: note = Description of Artificial Sequence: Synthetic peptide
LRPDTRYVLMDGSIIQFPNTYLEGS

SEQ ID NO: 17175 - protein, 25 aa, synthetic construct
  REGION 1..25: note = Description of Artificial Sequence: Synthetic peptide
QCGHYKHITSKETLYCIDGALLTKS

SEQ ID NO: 17176 - protein, 25 aa, synthetic construct
  REGION 1..25: note = Description of Artificial Sequence: Synthetic peptide
YQCGHYKHITSKETLYCIDGALLTK

SEQ ID NO: 17177 - protein, 25 aa, synthetic construct
  REGION 1..25: note = Description of Artificial Sequence: Synthetic peptide
NYQCGHYKHITSKETLYCIDGALLT

SEQ ID NO: 17178 - protein, 25 aa, synthetic construct
  REGION 1..25: note = Description of Artificial Sequence: Synthetic peptide
LPGTILRTTNGDFLHFLPRVFSAVG

SEQ ID NO: 17179 - protein, 25 aa, synthetic construct
  REGION 1..25: note = Description of Artificial Sequence: Synthetic peptide
KFISTCACEIVGGQIVTCAKEIKES

SEQ ID NO: 17180 - protein, 25 aa, synthetic construct
  REGION 1..25: note = Description of Artificial Sequence: Synthetic peptide
FISTCACEIVGGQIVTCAKEIKESV

SEQ ID NO: 17181 - protein, 25 aa, synthetic construct
  REGION 1..25: note = Description of Artificial Sequence: Synthetic peptide
ILRTTNGDFLHFLPRVFSAVGNICY

SEQ ID NO: 17182 - protein, 25 aa, synthetic construct
  REGION 1..25: note = Description of Artificial Sequence: Synthetic peptide
LRTTNGDFLHFLPRVFSAVGNICYT

SEQ ID NO: 17183 - protein, 25 aa, synthetic construct
  REGION 1..25: note = Description of Artificial Sequence: Synthetic peptide
RTTNGDFLHFLPRVFSAVGNICYTP

SEQ ID NO: 17184 - protein, 25 aa, synthetic construct
  REGION 1..25: note = Description of Artificial Sequence: Synthetic peptide
LPSIISNEKQEILGTVSWNLREMLA

SEQ ID NO: 17185 - protein, 25 aa, synthetic construct
  REGION 1..25: note = Description of Artificial Sequence: Synthetic peptide
ILPSIISNEKQEILGTVSWNLREML

SEQ ID NO: 17186 - protein, 25 aa, synthetic construct
  REGION 1..25: note = Description of Artificial Sequence: Synthetic peptide
HSLSHFVNLDNLRANNTKGSLPINV

SEQ ID NO: 17187 - protein, 25 aa, synthetic construct
  REGION 1..25: note = Description of Artificial Sequence: Synthetic peptide
SLSHFVNLDNLRANNTKGSLPINVI

SEQ ID NO: 17188 - protein, 25 aa, synthetic construct
  REGION 1..25: note = Description of Artificial Sequence: Synthetic peptide
TYERHSLSHFVNLDNLRANNTKGSL

SEQ ID NO: 17189 - protein, 25 aa, synthetic construct
  REGION 1..25: note = Description of Artificial Sequence: Synthetic peptide
QKTYERHSLSHFVNLDNLRANNTKG

SEQ ID NO: 17190 - protein, 25 aa, synthetic construct
  REGION 1..25: note = Description of Artificial Sequence: Synthetic peptide
KTYERHSLSHFVNLDNLRANNTKGS

SEQ ID NO: 17191 - protein, 25 aa, synthetic construct
  REGION 1..25: note = Description of Artificial Sequence: Synthetic peptide
SAFYILPSIISNEKQEILGTVSWNL

SEQ ID NO: 17192 - protein, 25 aa, synthetic construct
  REGION 1..25: note = Description of Artificial Sequence: Synthetic peptide
PGTILRTTNGDFLHFLPRVFSAVGN

SEQ ID NO: 17193 - protein, 25 aa, synthetic construct
  REGION 1..25: note = Description of Artificial Sequence: Synthetic peptide
GTILRTTNGDFLHFLPRVFSAVGNI

SEQ ID NO: 17194 - protein, 25 aa, synthetic construct
  REGION 1..25: note = Description of Artificial Sequence: Synthetic peptide
KLVSSFLEMKSEKQVEQKIAEIPKE

SEQ ID NO: 17195 - protein, 25 aa, synthetic construct
  REGION 1..25: note = Description of Artificial Sequence: Synthetic peptide
DKLVSSFLEMKSEKQVEQKIAEIPK

SEQ ID NO: 17196 - protein, 25 aa, synthetic construct
  REGION 1..25: note = Description of Artificial Sequence: Synthetic peptide
DKNLYDKLVSSFLEMKSEKQVEQKI

SEQ ID NO: 17197 - protein, 25 aa, synthetic construct
  REGION 1..25: note = Description of Artificial Sequence: Synthetic peptide
NLYDKLVSSFLEMKSEKQVEQKIAE

SEQ ID NO: 17198 - protein, 25 aa, synthetic construct
  REGION 1..25: note = Description of Artificial Sequence: Synthetic peptide
FDKNLYDKLVSSFLEMKSEKQVEQK

SEQ ID NO: 17199 - protein, 25 aa, synthetic construct
  REGION 1..25: note = Description of Artificial Sequence: Synthetic peptide
LYDKLVSSFLEMKSEKQVEQKIAEI

SEQ ID NO: 17200 - protein, 25 aa, synthetic construct
  REGION 1..25: note = Description of Artificial Sequence: Synthetic peptide
YDKLVSSFLEMKSEKQVEQKIAEIP

SEQ ID NO: 17201 - protein, 25 aa, synthetic construct
  REGION 1..25: note = Description of Artificial Sequence: Synthetic peptide
KNLYDKLVSSFLEMKSEKQVEQKIA

SEQ ID NO: 17202 - protein, 25 aa, synthetic construct
  REGION 1..25: note = Description of Artificial Sequence: Synthetic peptide
IKESVQTFFKLVNKFLALCADSIII

SEQ ID NO: 17203 - protein, 25 aa, synthetic construct
  REGION 1..25: note = Description of Artificial Sequence: Synthetic peptide
EIKESVQTFFKLVNKFLALCADSII

SEQ ID NO: 17204 - protein, 25 aa, synthetic construct
  REGION 1..25: note = Description of Artificial Sequence: Synthetic peptide
GTTTLNGLWLDDVVYCPRHVICTSE

SEQ ID NO: 17205 - protein, 25 aa, synthetic construct
  REGION 1..25: note = Description of Artificial Sequence: Synthetic peptide
CGTTTLNGLWLDDVVYCPRHVICTS

SEQ ID NO: 17206 - protein, 25 aa, synthetic construct
  REGION 1..25: note = Description of Artificial Sequence: Synthetic peptide
GVEAVMYMGTLSYEQFKKGVQIPCT

SEQ ID NO: 17207 - protein, 25 aa, synthetic construct
  REGION 1..25: note = Description of Artificial Sequence: Synthetic peptide
ASEYTGNYQCGHYKHITSKETLYCI

SEQ ID NO: 17208 - protein, 25 aa, synthetic construct
  REGION 1..25: note = Description of Artificial Sequence: Synthetic peptide
SEYTGNYQCGHYKHITSKETLYCID

SEQ ID NO: 17209 - protein, 25 aa, synthetic construct
  REGION 1..25: note = Description of Artificial Sequence: Synthetic peptide
CASEYTGNYQCGHYKHITSKETLYC

SEQ ID NO: 17210 - protein, 25 aa, synthetic construct
  REGION 1..25: note = Description of Artificial Sequence: Synthetic peptide
TLKGVEAVMYMGTLSYEQFKKGVQI

SEQ ID NO: 17211 - protein, 25 aa, synthetic construct
  REGION 1..25: note = Description of Artificial Sequence: Synthetic peptide
TTLKGVEAVMYMGTLSYEQFKKGVQ

SEQ ID NO: 17212 - protein, 25 aa, synthetic construct
  REGION 1..25: note = Description of Artificial Sequence: Synthetic peptide
KSHNIALIWNVKDFMSLSEQLRKQI

SEQ ID NO: 17213 - protein, 25 aa, synthetic construct
  REGION 1..25: note = Description of Artificial Sequence: Synthetic peptide
SHNIALIWNVKDFMSLSEQLRKQIR

SEQ ID NO: 17214 - protein, 25 aa, synthetic construct
  REGION 1..25: note = Description of Artificial Sequence: Synthetic peptide
HNIALIWNVKDFMSLSEQLRKQIRS

SEQ ID NO: 17215 - protein, 25 aa, synthetic construct
  REGION 1..25: note = Description of Artificial Sequence: Synthetic peptide
EFLRDGWEIVKFISTCACEIVGGQI

SEQ ID NO: 17216 - protein, 25 aa, synthetic construct
  REGION 1..25: note = Description of Artificial Sequence: Synthetic peptide
VEFLRDGWEIVKFISTCACEIVGGQ

SEQ ID NO: 17217 - protein, 25 aa, synthetic construct
  REGION 1..25: note = Description of Artificial Sequence: Synthetic peptide
QAIASEFSSLPSYAAFATAQEAYEQ

SEQ ID NO: 17218 - protein, 25 aa, synthetic construct
  REGION 1..25: note = Description of Artificial Sequence: Synthetic peptide
GNYQCGHYKHITSKETLYCIDGALL

SEQ ID NO: 17219 - protein, 25 aa, synthetic construct
  REGION 1..25: note = Description of Artificial Sequence: Synthetic peptide
VGGQIVTCAKEIKESVQTFFKLVNK

SEQ ID NO: 17220 - protein, 25 aa, synthetic construct
  REGION 1..25: note = Description of Artificial Sequence: Synthetic peptide
RHSLSHFVNLDNLRANNTKGSLPIN

SEQ ID NO: 17221 - protein, 25 aa, synthetic construct
  REGION 1..25: note = Description of Artificial Sequence: Synthetic peptide
ERHSLSHFVNLDNLRANNTKGSLPI

SEQ ID NO: 17222 - protein, 25 aa, synthetic construct
  REGION 1..25: note = Description of Artificial Sequence: Synthetic peptide
YERHSLSHFVNLDNLRANNTKGSLP

SEQ ID NO: 17223 - protein, 25 aa, synthetic construct
  REGION 1..25: note = Description of Artificial Sequence: Synthetic peptide
EEAKTVLKKCKSAFYILPSIISNEK

SEQ ID NO: 17224 - protein, 25 aa, synthetic construct
  REGION 1..25: note = Description of Artificial Sequence: Synthetic peptide
TTTLNGLWLDDVVYCPRHVICTSED

SEQ ID NO: 17225 - protein, 25 aa, synthetic construct
  REGION 1..25: note = Description of Artificial Sequence: Synthetic peptide
LRDGWEIVKFISTCACEIVGGQIVT

SEQ ID NO: 17226 - protein, 25 aa, synthetic construct
  REGION 1..25: note = Description of Artificial Sequence: Synthetic peptide
FLRDGWEIVKFISTCACEIVGGQIV

SEQ ID NO: 17227 - protein, 25 aa, synthetic construct
  REGION 1..25: note = Description of Artificial Sequence: Synthetic peptide
AKSHNIALIWNVKDFMSLSEQLRKQ

SEQ ID NO: 17228 - protein, 25 aa, synthetic construct
  REGION 1..25: note = Description of Artificial Sequence: Synthetic peptide
FAVDAAKAYKDYLASGGQPITNCVK

SEQ ID NO: 17229 - protein, 25 aa, synthetic construct
  REGION 1..25: note = Description of Artificial Sequence: Synthetic peptide
TFHLDGEVITFDNLKTLLSLREVRT

SEQ ID NO: 17230 - protein, 25 aa, synthetic construct
  REGION 1..25: note = Description of Artificial Sequence: Synthetic peptide
HLDGEVITFDNLKTLLSLREVRTIK

SEQ ID NO: 17231 - protein, 25 aa, synthetic construct
  REGION 1..25: note = Description of Artificial Sequence: Synthetic peptide
FHLDGEVITFDNLKTLLSLREVRTI

SEQ ID NO: 17232 - protein, 25 aa, synthetic construct
  REGION 1..25: note = Description of Artificial Sequence: Synthetic peptide
TTFHLDGEVITFDNLKTLLSLREVR

SEQ ID NO: 17233 - protein, 25 aa, synthetic construct
  REGION 1..25: note = Description of Artificial Sequence: Synthetic peptide
ILASFSASTSAFVETVKGLDYKAFK

SEQ ID NO: 17234 - protein, 25 aa, synthetic construct
  REGION 1..25: note = Description of Artificial Sequence: Synthetic peptide
ASFSASTSAFVETVKGLDYKAFKQI

SEQ ID NO: 17235 - protein, 25 aa, synthetic construct
  REGION 1..25: note = Description of Artificial Sequence: Synthetic peptide
DDVVYCPRHVICTSEDMLNPNYEDL

SEQ ID NO: 17236 - protein, 25 aa, synthetic construct
  REGION 1..25: note = Description of Artificial Sequence: Synthetic peptide
ESVQTFFKLVNKFLALCADSIIIGG

SEQ ID NO: 17237 - protein, 25 aa, synthetic construct
  REGION 1..25: note = Description of Artificial Sequence: Synthetic peptide
EIVGGQIVTCAKEIKESVQTFFKLV

SEQ ID NO: 17238 - protein, 25 aa, synthetic construct
  REGION 1..25: note = Description of Artificial Sequence: Synthetic peptide
CEIVGGQIVTCAKEIKESVQTFFKL

SEQ ID NO: 17239 - protein, 25 aa, synthetic construct
  REGION 1..25: note = Description of Artificial Sequence: Synthetic peptide
TVLKKCKSAFYILPSIISNEKQEIL

SEQ ID NO: 17240 - protein, 25 aa, synthetic construct
  REGION 1..25: note = Description of Artificial Sequence: Synthetic peptide
TTNGDFLHFLPRVFSAVGNICYTPS

SEQ ID NO: 17241 - protein, 25 aa, synthetic construct
  REGION 1..25: note = Description of Artificial Sequence: Synthetic peptide
TGNYQCGHYKHITSKETLYCIDGAL

SEQ ID NO: 17242 - protein, 25 aa, synthetic construct
  REGION 1..25: note = Description of Artificial Sequence: Synthetic peptide
YTGNYQCGHYKHITSKETLYCIDGA

SEQ ID NO: 17243 - protein, 25 aa, synthetic construct
  REGION 1..25: note = Description of Artificial Sequence: Synthetic peptide
EYTGNYQCGHYKHITSKETLYCIDG

SEQ ID NO: 17244 - protein, 25 aa, synthetic construct
  REGION 1..25: note = Description of Artificial Sequence: Synthetic peptide
FCAFAVDAAKAYKDYLASGGQPITN

SEQ ID NO: 17245 - protein, 25 aa, synthetic construct
  REGION 1..25: note = Description of Artificial Sequence: Synthetic peptide
CAFAVDAAKAYKDYLASGGQPITNC

SEQ ID NO: 17246 - protein, 25 aa, synthetic construct
  REGION 1..25: note = Description of Artificial Sequence: Synthetic peptide
AFAVDAAKAYKDYLASGGQPITNCV

SEQ ID NO: 17247 - protein, 25 aa, synthetic construct
  REGION 1..25: note = Description of Artificial Sequence: Synthetic peptide
LASFSASTSAFVETVKGLDYKAFKQ

SEQ ID NO: 17248 - protein, 25 aa, synthetic construct
  REGION 1..25: note = Description of Artificial Sequence: Synthetic peptide
LDGEVITFDNLKTLLSLREVRTIKV

SEQ ID NO: 17249 - protein, 25 aa, synthetic construct
  REGION 1..25: note = Description of Artificial Sequence: Synthetic peptide
CACEIVGGQIVTCAKEIKESVQTFF

SEQ ID NO: 17250 - protein, 25 aa, synthetic construct
  REGION 1..25: note = Description of Artificial Sequence: Synthetic peptide
ISTCACEIVGGQIVTCAKEIKESVQ

SEQ ID NO: 17251 - protein, 25 aa, synthetic construct
  REGION 1..25: note = Description of Artificial Sequence: Synthetic peptide
STCACEIVGGQIVTCAKEIKESVQT

SEQ ID NO: 17252 - protein, 25 aa, synthetic construct
  REGION 1..25: note = Description of Artificial Sequence: Synthetic peptide
TCACEIVGGQIVTCAKEIKESVQTF

SEQ ID NO: 17253 - protein, 25 aa, synthetic construct
  REGION 1..25: note = Description of Artificial Sequence: Synthetic peptide
ACEIVGGQIVTCAKEIKESVQTFFK

SEQ ID NO: 17254 - protein, 25 aa, synthetic construct
  REGION 1..25: note = Description of Artificial Sequence: Synthetic peptide
SPFVMMSAPPAQYELKHGTFTCASE

SEQ ID NO: 17255 - protein, 25 aa, synthetic construct
  REGION 1..25: note = Description of Artificial Sequence: Synthetic peptide
IVGGQIVTCAKEIKESVQTFFKLVN

SEQ ID NO: 17256 - protein, 25 aa, synthetic construct
  REGION 1..25: note = Description of Artificial Sequence: Synthetic peptide
KTVLKKCKSAFYILPSIISNEKQEI

SEQ ID NO: 17257 - protein, 25 aa, synthetic construct
  REGION 1..25: note = Description of Artificial Sequence: Synthetic peptide
KESVQTFFKLVNKFLALCADSIIIG

SEQ ID NO: 17258 - protein, 25 aa, synthetic construct
  REGION 1..25: note = Description of Artificial Sequence: Synthetic peptide
AKTVLKKCKSAFYILPSIISNEKQE

SEQ ID NO: 17259 - protein, 25 aa, synthetic construct
  REGION 1..25: note = Description of Artificial Sequence: Synthetic peptide
EAKTVLKKCKSAFYILPSIISNEKQ

SEQ ID NO: 17260 - protein, 25 aa, synthetic construct
  REGION 1..25: note = Description of Artificial Sequence: Synthetic peptide
TTLNGLWLDDVVYCPRHVICTSEDM

SEQ ID NO: 17261 - protein, 25 aa, synthetic construct
  REGION 1..25: note = Description of Artificial Sequence: Synthetic peptide
STQEFRYMNSQGLLPPKNSIDAFKL

SEQ ID NO: 17262 - protein, 25 aa, synthetic construct
  REGION 1..25: note = Description of Artificial Sequence: Synthetic peptide
ESPFVMMSAPPAQYELKHGTFTCAS

SEQ ID NO: 17263 - protein, 25 aa, synthetic construct
  REGION 1..25: note = Description of Artificial Sequence: Synthetic peptide
TNGDFLHFLPRVFSAVGNICYTPSK

SEQ ID NO: 17264 - protein, 25 aa, synthetic construct
  REGION 1..25: note = Description of Artificial Sequence: Synthetic peptide
KSAFYILPSIISNEKQEILGTVSWN

SEQ ID NO: 17265 - protein, 25 aa, synthetic construct
  REGION 1..25: note = Description of Artificial Sequence: Synthetic peptide
TLNGLWLDDVVYCPRHVICTSEDML

SEQ ID NO: 17266 - protein, 25 aa, synthetic construct
  REGION 1..25: note = Description of Artificial Sequence: Synthetic peptide
VSTQEFRYMNSQGLLPPKNSIDAFK

SEQ ID NO: 17267 - protein, 25 aa, synthetic construct
  REGION 1..25: note = Description of Artificial Sequence: Synthetic peptide
VQQESPFVMMSAPPAQYELKHGTFT

SEQ ID NO: 17268 - protein, 25 aa, synthetic construct
  REGION 1..25: note = Description of Artificial Sequence: Synthetic peptide
KQATKYLVQQESPFVMMSAPPAQYE

SEQ ID NO: 17269 - protein, 25 aa, synthetic construct
  REGION 1..25: note = Description of Artificial Sequence: Synthetic peptide
QQESPFVMMSAPPAQYELKHGTFTC

SEQ ID NO: 17270 - protein, 25 aa, synthetic construct
  REGION 1..25: note = Description of Artificial Sequence: Synthetic peptide
QESPFVMMSAPPAQYELKHGTFTCA

SEQ ID NO: 17271 - protein, 25 aa, synthetic construct
  REGION 1..25: note = Description of Artificial Sequence: Synthetic peptide
TKYLVQQESPFVMMSAPPAQYELKH

SEQ ID NO: 17272 - protein, 25 aa, synthetic construct
  REGION 1..25: note = Description of Artificial Sequence: Synthetic peptide
ATKYLVQQESPFVMMSAPPAQYELK

SEQ ID NO: 17273 - protein, 25 aa, synthetic construct
  REGION 1..25: note = Description of Artificial Sequence: Synthetic peptide
KYLVQQESPFVMMSAPPAQYELKHG

SEQ ID NO: 17274 - protein, 25 aa, synthetic construct
  REGION 1..25: note = Description of Artificial Sequence: Synthetic peptide
QATKYLVQQESPFVMMSAPPAQYEL

SEQ ID NO: 17275 - protein, 25 aa, synthetic construct
  REGION 1..25: note = Description of Artificial Sequence: Synthetic peptide
LVQQESPFVMMSAPPAQYELKHGTF

SEQ ID NO: 17276 - protein, 25 aa, synthetic construct
  REGION 1..25: note = Description of Artificial Sequence: Synthetic peptide
YLVQQESPFVMMSAPPAQYELKHGT

SEQ ID NO: 17277 - protein, 25 aa, synthetic construct
  REGION 1..25: note = Description of Artificial Sequence: Synthetic peptide
LNGLWLDDVVYCPRHVICTSEDMLN

SEQ ID NO: 17278 - protein, 25 aa, synthetic construct
  REGION 1..25: note = Description of Artificial Sequence: Synthetic peptide
NGLWLDDVVYCPRHVICTSEDMLNP

SEQ ID NO: 17279 - protein, 25 aa, synthetic construct
  REGION 1..25: note = Description of Artificial Sequence: Synthetic peptide
LGVYDYLVSTQEFRYMNSQGLLPPK

SEQ ID NO: 17280 - protein, 25 aa, synthetic construct
  REGION 1..25: note = Description of Artificial Sequence: Synthetic peptide
LWLDDVVYCPRHVICTSEDMLNPNY

SEQ ID NO: 17281 - protein, 25 aa, synthetic construct
  REGION 1..25: note = Description of Artificial Sequence: Synthetic peptide
KKCKSAFYILPSIISNEKQEILGTV

SEQ ID NO: 17282 - protein, 25 aa, synthetic construct
  REGION 1..25: note = Description of Artificial Sequence: Synthetic peptide
KCKSAFYILPSIISNEKQEILGTVS

SEQ ID NO: 17283 - protein, 25 aa, synthetic construct
  REGION 1..25: note = Description of Artificial Sequence: Synthetic peptide
CKSAFYILPSIISNEKQEILGTVSW

SEQ ID NO: 17284 - protein, 25 aa, synthetic construct
  REGION 1..25: note = Description of Artificial Sequence: Synthetic peptide
DYLVSTQEFRYMNSQGLLPPKNSID

SEQ ID NO: 17285 - protein, 25 aa, synthetic construct
  REGION 1..25: note = Description of Artificial Sequence: Synthetic peptide
LVSTQEFRYMNSQGLLPPKNSIDAF

SEQ ID NO: 17286 - protein, 25 aa, synthetic construct
  REGION 1..25: note = Description of Artificial Sequence: Synthetic peptide
YLVSTQEFRYMNSQGLLPPKNSIDA

SEQ ID NO: 17287 - protein, 25 aa, synthetic construct
  REGION 1..25: note = Description of Artificial Sequence: Synthetic peptide
LDDVVYCPRHVICTSEDMLNPNYED

SEQ ID NO: 17288 - protein, 25 aa, synthetic construct
  REGION 1..25: note = Description of Artificial Sequence: Synthetic peptide
WLDDVVYCPRHVICTSEDMLNPNYE

SEQ ID NO: 17289 - protein, 25 aa, synthetic construct
  REGION 1..25: note = Description of Artificial Sequence: Synthetic peptide
GLWLDDVVYCPRHVICTSEDMLNPN

SEQ ID NO: 17290 - protein, 25 aa, synthetic construct
  REGION 1..25: note = Description of Artificial Sequence: Synthetic peptide
LKKCKSAFYILPSIISNEKQEILGT

SEQ ID NO: 17291 - protein, 25 aa, synthetic construct
  REGION 1..25: note = Description of Artificial Sequence: Synthetic peptide
VLKKCKSAFYILPSIISNEKQEILG

SEQ ID NO: 17292 - protein, 25 aa, synthetic construct
  REGION 1..25: note = Description of Artificial Sequence: Synthetic peptide
YDYLVSTQEFRYMNSQGLLPPKNSI

SEQ ID NO: 17293 - protein, 25 aa, synthetic construct
  REGION 1..25: note = Description of Artificial Sequence: Synthetic peptide
VYDYLVSTQEFRYMNSQGLLPPKNS

SEQ ID NO: 17294 - protein, 25 aa, synthetic construct
  REGION 1..25: note = Description of Artificial Sequence: Synthetic peptide
GVYDYLVSTQEFRYMNSQGLLPPKN

SEQ ID NO: 17295 - protein, 25 aa, synthetic construct
  REGION 1..25: note = Description of Artificial Sequence: Synthetic peptide
TLNSLEDKAFQLTPIAVQMTKLATT

SEQ ID NO: 17296 - protein, 25 aa, synthetic construct
  REGION 1..25: note = Description of Artificial Sequence: Synthetic peptide
ALRLVDPQIQLAVTRMENAVGRDQN

SEQ ID NO: 17297 - protein, 25 aa, synthetic construct
  REGION 1..25: note = Description of Artificial Sequence: Synthetic peptide
RLVDPQIQLAVTRMENAVGRDQNNV

SEQ ID NO: 17298 - protein, 25 aa, synthetic construct
  REGION 1..25: note = Description of Artificial Sequence: Synthetic peptide
LRLVDPQIQLAVTRMENAVGRDQNN

SEQ ID NO: 17299 - protein, 25 aa, synthetic construct
  REGION 1..25: note = Description of Artificial Sequence: Synthetic peptide
PALRLVDPQIQLAVTRMENAVGRDQ

SEQ ID NO: 17300 - protein, 25 aa, synthetic construct
  REGION 1..25: note = Description of Artificial Sequence: Synthetic peptide
LVDPQIQLAVTRMENAVGRDQNNVG

SEQ ID NO: 17301 - protein, 25 aa, synthetic construct
  REGION 1..25: note = Description of Artificial Sequence: Synthetic peptide
VDPQIQLAVTRMENAVGRDQNNVGP

SEQ ID NO: 17302 - protein, 25 aa, synthetic construct
  REGION 1..25: note = Description of Artificial Sequence: Synthetic peptide
EDKAFQLTPIAVQMTKLATTEELPD

SEQ ID NO: 17303 - protein, 25 aa, synthetic construct
  REGION 1..25: note = Description of Artificial Sequence: Synthetic peptide
VGPKVYPIILRLGSPLSLNMARKTL

SEQ ID NO: 17304 - protein, 25 aa, synthetic construct
  REGION 1..25: note = Description of Artificial Sequence: Synthetic peptide
NVGPKVYPIILRLGSPLSLNMARKT

SEQ ID NO: 17305 - protein, 25 aa, synthetic construct
  REGION 1..25: note = Description of Artificial Sequence: Synthetic peptide
QNNVGPKVYPIILRLGSPLSLNMAR

SEQ ID NO: 17306 - protein, 25 aa, synthetic construct
  REGION 1..25: note = Description of Artificial Sequence: Synthetic peptide
DPQIQLAVTRMENAVGRDQNNVGPK

SEQ ID NO: 17307 - protein, 25 aa, synthetic construct
  REGION 1..25: note = Description of Artificial Sequence: Synthetic peptide
NNVGPKVYPIILRLGSPLSLNMARK

SEQ ID NO: 17308 - protein, 25 aa, synthetic construct
  REGION 1..25: note = Description of Artificial Sequence: Synthetic peptide
KTLNSLEDKAFQLTPIAVQMTKLAT

SEQ ID NO: 17309 - protein, 25 aa, synthetic construct
  REGION 1..25: note = Description of Artificial Sequence: Synthetic peptide
NSLEDKAFQLTPIAVQMTKLATTEE

SEQ ID NO: 17310 - protein, 25 aa, synthetic construct
  REGION 1..25: note = Description of Artificial Sequence: Synthetic peptide
LNSLEDKAFQLTPIAVQMTKLATTE

SEQ ID NO: 17311 - protein, 25 aa, synthetic construct
  REGION 1..25: note = Description of Artificial Sequence: Synthetic peptide
LEDKAFQLTPIAVQMTKLATTEELP

SEQ ID NO: 17312 - protein, 25 aa, synthetic construct
  REGION 1..25: note = Description of Artificial Sequence: Synthetic peptide
SLEDKAFQLTPIAVQMTKLATTEEL

SEQ ID NO: 17313 - protein, 25 aa, synthetic construct
  REGION 1..25: note = Description of Artificial Sequence: Synthetic peptide
PLSLNMARKTLNSLEDKAFQLTPIA

SEQ ID NO: 17314 - protein, 25 aa, synthetic construct
  REGION 1..25: note = Description of Artificial Sequence: Synthetic peptide
LSLNMARKTLNSLEDKAFQLTPIAV

SEQ ID NO: 17315 - protein, 25 aa, synthetic construct
  REGION 1..25: note = Description of Artificial Sequence: Synthetic peptide
GPKVYPIILRLGSPLSLNMARKTLN

SEQ ID NO: 17316 - protein, 25 aa, synthetic construct
  REGION 1..25: note = Description of Artificial Sequence: Synthetic peptide
MARKTLNSLEDKAFQLTPIAVQMTK

SEQ ID NO: 17317 - protein, 25 aa, synthetic construct
  REGION 1..25: note = Description of Artificial Sequence: Synthetic peptide
ARKTLNSLEDKAFQLTPIAVQMTKL

SEQ ID NO: 17318 - protein, 25 aa, synthetic construct
  REGION 1..25: note = Description of Artificial Sequence: Synthetic peptide
RDQNNVGPKVYPIILRLGSPLSLNM

SEQ ID NO: 17319 - protein, 25 aa, synthetic construct
  REGION 1..25: note = Description of Artificial Sequence: Synthetic peptide
GRDQNNVGPKVYPIILRLGSPLSLN

SEQ ID NO: 17320 - protein, 25 aa, synthetic construct
  REGION 1..25: note = Description of Artificial Sequence: Synthetic peptide
DQNNVGPKVYPIILRLGSPLSLNMA

SEQ ID NO: 17321 - protein, 25 aa, synthetic construct
  REGION 1..25: note = Description of Artificial Sequence: Synthetic peptide
HPALRLVDPQIQLAVTRMENAVGRD

SEQ ID NO: 17322 - protein, 25 aa, synthetic construct
  REGION 1..25: note = Description of Artificial Sequence: Synthetic peptide
LNMARKTLNSLEDKAFQLTPIAVQM

SEQ ID NO: 17323 - protein, 25 aa, synthetic construct
  REGION 1..25: note = Description of Artificial Sequence: Synthetic peptide
NMARKTLNSLEDKAFQLTPIAVQMT

SEQ ID NO: 17324 - protein, 25 aa, synthetic construct
  REGION 1..25: note = Description of Artificial Sequence: Synthetic peptide
SLNMARKTLNSLEDKAFQLTPIAVQ

SEQ ID NO: 17325 - protein, 25 aa, synthetic construct
  REGION 1..25: note = Description of Artificial Sequence: Synthetic peptide
LTPIAVQMTKLATTEELPDEFVVVT

SEQ ID NO: 17326 - protein, 25 aa, synthetic construct
  REGION 1..25: note = Description of Artificial Sequence: Synthetic peptide
KAFQLTPIAVQMTKLATTEELPDEF

SEQ ID NO: 17327 - protein, 25 aa, synthetic construct
  REGION 1..25: note = Description of Artificial Sequence: Synthetic peptide
FQLTPIAVQMTKLATTEELPDEFVV

SEQ ID NO: 17328 - protein, 25 aa, synthetic construct
  REGION 1..25: note = Description of Artificial Sequence: Synthetic peptide
AFQLTPIAVQMTKLATTEELPDEFV

SEQ ID NO: 17329 - protein, 25 aa, synthetic construct
  REGION 1..25: note = Description of Artificial Sequence: Synthetic peptide
TPIAVQMTKLATTEELPDEFVVVTV

SEQ ID NO: 17330 - protein, 25 aa, synthetic construct
  REGION 1..25: note = Description of Artificial Sequence: Synthetic peptide
QLTPIAVQMTKLATTEELPDEFVVV

SEQ ID NO: 17331 - protein, 25 aa, synthetic construct
  REGION 1..25: note = Description of Artificial Sequence: Synthetic peptide
DKAFQLTPIAVQMTKLATTEELPDE

SEQ ID NO: 17332 - protein, 25 aa, synthetic construct
  REGION 1..25: note = Description of Artificial Sequence: Synthetic peptide
VGRDQNNVGPKVYPIILRLGSPLSL

SEQ ID NO: 17333 - protein, 25 aa, synthetic construct
  REGION 1..25: note = Description of Artificial Sequence: Synthetic peptide
AVGRDQNNVGPKVYPIILRLGSPLS

SEQ ID NO: 17334 - protein, 25 aa, synthetic construct
  REGION 1..25: note = Description of Artificial Sequence: Synthetic peptide
RKTLNSLEDKAFQLTPIAVQMTKLA

SEQ ID NO: 17335 - protein, 25 aa, synthetic construct
  REGION 1..25: note = Description of Artificial Sequence: Synthetic peptide
MHPALRLVDPQIQLAVTRMENAVGR

SEQ ID NO: 17336 - protein, 25 aa, synthetic construct
  REGION 1..25: note = Description of Artificial Sequence: Synthetic peptide
EMHPALRLVDPQIQLAVTRMENAVG

SEQ ID NO: 17337 - protein, 25 aa, synthetic construct
  REGION 1..25: note = Description of Artificial Sequence: Synthetic peptide
GSPLSLNMARKTLNSLEDKAFQLTP

SEQ ID NO: 17338 - protein, 25 aa, synthetic construct
  REGION 1..25: note = Description of Artificial Sequence: Synthetic peptide
LRLGSPLSLNMARKTLNSLEDKAFQ

SEQ ID NO: 17339 - protein, 25 aa, synthetic construct
  REGION 1..25: note = Description of Artificial Sequence: Synthetic peptide
LGSPLSLNMARKTLNSLEDKAFQLT

SEQ ID NO: 17340 - protein, 25 aa, synthetic construct
  REGION 1..25: note = Description of Artificial Sequence: Synthetic peptide
RLGSPLSLNMARKTLNSLEDKAFQL

SEQ ID NO: 17341 - protein, 25 aa, synthetic construct
  REGION 1..25: note = Description of Artificial Sequence: Synthetic peptide
SPLSLNMARKTLNSLEDKAFQLTPI

SEQ ID NO: 17342 - protein, 25 aa, synthetic construct
  REGION 1..25: note = Description of Artificial Sequence: Synthetic peptide
MDPKISEMHPALRLVDPQIQLAVTR

SEQ ID NO: 17343 - protein, 25 aa, synthetic construct
  REGION 1..25: note = Description of Artificial Sequence: Synthetic peptide
VYPIILRLGSPLSLNMARKTLNSLE

SEQ ID NO: 17344 - protein, 25 aa, synthetic construct
  REGION 1..25: note = Description of Artificial Sequence: Synthetic peptide
KVYPIILRLGSPLSLNMARKTLNSL

SEQ ID NO: 17345 - protein, 25 aa, synthetic construct
  REGION 1..25: note = Description of Artificial Sequence: Synthetic peptide
PKVYPIILRLGSPLSLNMARKTLNS

SEQ ID NO: 17346 - protein, 25 aa, synthetic construct
  REGION 1..25: note = Description of Artificial Sequence: Synthetic peptide
DPKISEMHPALRLVDPQIQLAVTRM

SEQ ID NO: 17347 - protein, 25 aa, synthetic construct
  REGION 1..25: note = Description of Artificial Sequence: Synthetic peptide
YPIILRLGSPLSLNMARKTLNSLED

SEQ ID NO: 17348 - protein, 25 aa, synthetic construct
  REGION 1..25: note = Description of Artificial Sequence: Synthetic peptide
SEMHPALRLVDPQIQLAVTRMENAV

SEQ ID NO: 17349 - protein, 25 aa, synthetic construct
  REGION 1..25: note = Description of Artificial Sequence: Synthetic peptide
PIAVQMTKLATTEELPDEFVVVTVK

SEQ ID NO: 17350 - protein, 14 aa, unidentified
  REGION 1..14: note = Description of Unknown: tetanus toxoid sequence
QYIKANSKFIGITE

SEQ ID NO: 17351 - protein, 21 aa, unidentified
  REGION 1..21: note = Description of Unknown: Plasmodium falciparum sequence
DIEKKIAKMEKASSVFNVVNS

SEQ ID NO: 17352 - protein, 16 aa, Streptococcus sp.
GAVDSILGGVATYGAA

SEQ ID NO: 17353 - protein, 13 aa, synthetic construct
  REGION 1..13: note = Description of Artificial Sequence: Synthetic peptide
  SITE 1: note = D-alanine
  MOD_RES 3: note = Cyclohexyl alanine, F or Y
  SITE 13: note = D-alanine
AKXVWANTLKAAA

SEQ ID NO: 17354 - RNA, 200 nt, synthetic construct
  misc_feature 1..200: note = Description of Artificial Sequence: Synthetic polynucleotide
  misc_feature 1..200: note = This sequence may encompass 50-200 nucleotides
  source 1..200: mol_type = other RNA
aaaaaaaaaaaaaaaaaaaaaaaaaaaaaaaaaaaaaaaaaaaaaaaaaaaaaaaaaaaaaaaaaaaaaaaaaaaaaaaaaaaaaaaaaaaaaaaaaaaaaaaaaaaaaaaaaaaaaaaaaaaaaaaaaaaaaaaaaaaaaaaaaaaaaaaaaaaaaaaaaaaaaaaaaaaaaaaaaaaaaaaaaaaaaaaaaaaaaaaa

SEQ ID NO: 17355 - RNA, 200 nt, synthetic construct; identical to SEQ ID NO: 17354
  misc_feature 1..200: note = Description of Artificial Sequence: Synthetic polynucleotide
  misc_feature 1..200: note = See specification as filed for detailed description of substitutions and preferred embodiments
  source 1..200: mol_type = other RNA

SEQ ID NO: 17356 - RNA, 180 nt, synthetic construct
  misc_feature 1..180: note = Description of Artificial Sequence: Synthetic polynucleotide
  misc_feature 1..180: note = See specification as filed for detailed description of substitutions and preferred embodiments
  source 1..180: mol_type = other RNA
aaaaaaaaaaaaaaaaaaaaaaaaaaaaaaaaaaaaaaaaaaaaaaaaaaaaaaaaaaaaaaaaaaaaaaaaaaaaaaaaaaaaaaaaaaaaaaaaaaaaaaaaaaaaaaaaaaaaaaaaaaaaaaaaaaaaaaaaaaaaaaaaaaaaaaaaaaaaaaaaaaaaaaaaaaaaaaaaaaaa

SEQ ID NO: 17357 - RNA, 150 nt, synthetic construct
  misc_feature 1..150: note = Description of Artificial Sequence: Synthetic polynucleotide
  misc_feature 1..150: note = See specification as filed for detailed description of substitutions and preferred embodiments
  source 1..150: mol_type = other RNA
aaaaaaaaaaaaaaaaaaaaaaaaaaaaaaaaaaaaaaaaaaaaaaaaaaaaaaaaaaaaaaaaaaaaaaaaaaaaaaaaaaaaaaaaaaaaaaaaaaaaaaaaaaaaaaaaaaaaaaaaaaaaaaaaaaaaaaaaaaaaaaaaaaaaaa

SEQ ID NO: 17358 - RNA, 120 nt, synthetic construct
  misc_feature 1..120: note = Description of Artificial Sequence: Synthetic polynucleotide
  misc_feature 1..120: note = See specification as filed for detailed description of substitutions and preferred embodiments
  source 1..120: mol_type = other RNA
aaaaaaaaaaaaaaaaaaaaaaaaaaaaaaaaaaaaaaaaaaaaaaaaaaaaaaaaaaaaaaaaaaaaaaaaaaaaaaaaaaaaaaaaaaaaaaaaaaaaaaaaaaaaaaaaaaaaaaaa

SEQ ID NO: 17359 - RNA, 4283 nt, synthetic construct
  misc_feature 1..4283: note = Description of Artificial Sequence: Synthetic polynucleotide
  source 1..4283: mol_type = other RNA
agaataaactagtattcttctggtccccacagactcagagagaacccgccaccatgtttgtgtttcttgtgctgctgcctcttgtgtcttctcagtgtgtgaatttgacaacaagaacacagctgccaccagcttatacaaattcttttaccagaggagtgtattatcctgataaagtgtttagatcttctgtgctgcacagcacacaggacctgtttctgccattttttagcaatgtgacatggtttcatgcaattcatgtgtctggaacaaatggaacaaaaagatttgataatcctgtgctgccttttaatgatggagtgtattttgcttcaacagaaaagtcaaatattattagaggatggatttttggaacaacactggattctaaaacacagtctctgctgattgtgaataatgcaacaaatgtggtgattaaagtgtgtgaatttcagttttgtaatgatccttttctgggagtgtattatcacaaaaataataaatcttggatggaatctgaatttagagtgtattcctctgcaaataattgtacatttgaatatgtgtctcagccttttctgatggatctggaaggaaaacagggcaattttaaaaatctgagagaatttgtgtttaaaaatattgatggatattttaaaatttattctaaacacacaccaattaatttagtgagagatctgcctcagggattttctgctctggaacctctggtggatctgccaattggcattaatattacaagatttcagacactgctggctctgcacagatcttatctgacacctggagattcttcttctggatggacagccggagctgcagcttattatgtgggctatctgcagccaagaacatttctgctgaaatataatgaaaatggaacaattacagatgctgtggattgtgctctggatcctctgtctgaaacaaaatgtacattaaaatcttttacagtggaaaaaggcatttatcagacatctaattttagagtgcagccaacagaatctattgtgagatttccaaatattacaaatctgtgtccatttggagaagtgtttaatgcaacaagatttgcatctgtgtatgcatggaatagaaaaagaatttctaattgtgtggctgattattctgtgctgtataatagtgcttctttttccacatttaaatgttatggagtgtctccaacaaaattaaatgatttatgttttacaaatgtgtatgctgattcttttgtgatcagaggtgatgaagtgagacagattgcccccggacagacaggaaaaattgctgattacaattacaaactgcctgatgattttacaggatgtgtgattgcttggaattctaataatttagattctaaagtgggaggaaattacaattatctgtacagactgtttagaaaatcaaatctgaaaccttttgaaagagatatttcaacagaaatttatcaggctggatcaacaccttgtaatggagtggaaggatttaattgttattttccattacagagctatggatttcagccaaccaatggtgtgggatatcagccatatagagtggtggtgctgtcttttgaactgctgcatgcacctgcaacagtgtgtggacctaaaaaatctacaaatttagtgaaaaataaatgtgtgaattttaattttaatggattaacaggaacaggagtgctgacagaatctaataaaaaatttctgccttttcagcagtttggcagagatattgcagataccacagatgcagtgagagatcctcagacattagaaattctggatattacaccttgttcttttgggggtgtgtctgtgattacacctggaacaaatacatctaatcaggtggctgtgctgtatcaggatgtgaattgtacagaagtgccagtggcaattcatgcagatcagctgacaccaacatggagagtgtattctacaggatctaatgtgtttcagacaagagcaggatgtctgattggagcagaacatgtgaataattcttatgaatgtgatattccaattggagcaggcatttgtgcatcttatcagacacagacaaattccccaaggagagcaagatctgtggcatctcagtctattattgcatacaccatgtctctgggagcagaaaattctgtggcatattctaataattctattgctattccaacaaattttaccatttctgtgacaacagaaattttacctgtgtctatgacaaaaacatctgtggattgtaccatgtacatttgtggagattctacagaatgttctaatctgctgctgcagtatggatctttttgtacacagctgaatagagctttaacaggaattgctgtggaacaggataaaaatacacaggaagtgtttgctcaggtgaaacagatttacaaaacaccaccaattaaagattttggaggatttaattttagccagattctgcctgatccttctaaaccttctaaaagatcttttattgaagatctgctgtttaataaagtgacactggcagatgcaggatttattaaacagtatggagattgcctgggtgatattgctgcaagagatctgatttgtgctcagaaatttaatggactgacagtgctgcctcctctgctgacagatgaaatgattgctcagtacacatctgctttactggctggaacaattacaagcggatggacatttggagctggagctgctctgcagattccttttgcaatgcagatggcttacagatttaatggaattggagtgacacagaatgtgttatatgaaaatcagaaactgattgcaaatcagtttaattctgcaattggcaaaattcaggattctctgtcttctacagcttctgctctgggaaaactgcaggatgtggtgaatcagaatgcacaggcactgaatactctggtgaaacagctgtctagcaattttggggcaatttcttctgtgctgaatgatattctgtctagactggatcctcctgaagctgaagtgcagattgatagactgatcacaggaagactgcagtctctgcagacttatgtgacacagcagctgattagagctgctgaaattagagcttctgctaatctggctgctacaaaaatgtctgaatgtgtgctgggacagtcaaaaagagtggatttttgtggaaaaggatatcatctgatgtcttttccacagtctgctccacatggagtggtgtttttacatgtgacatatgtgccagcacaggaaaagaattttaccacagcaccagcaatttgtcatgatggaaaagcacattttccaagagaaggagtgtttgtgtctaatggaacacattggtttgtgacacagagaaatttttatgaacctcagattattacaacagataatacatttgtgtcaggaaattgtgatgtggtgattggaattgtgaataatacagtgtatgatccactgcagccagaactggattcttttaaagaagaactggataaatattttaaaaatcacacatctcctgatgtggatttaggagatatttctggaatcaatgcatctgtggtgaatattcagaaagaaattgatagactgaatgaagtggccaaaaatctgaatgaatctctgattgatctgcaggaacttggaaaatatgaacagtacattaaatggccttggtacatttggcttggatttattgcaggattaattgcaattgtgatggtgacaattatgttatgttgtatgacatcatgttgttcttgtttaaaaggatgttgttcttgtggaagctgttgtaaatttgatgaagatgattctgaacctgtgttaaaaggagtgaaattgcattacacatgatgactcgagctggtactgcatgcacgcaatgctagctgcccctttcccgtcctgggtaccccgagtctcccccgacctcgggtcccaggtatgctcccacctccacctgccccactcaccacctctgctagttccagacacctcccaagcacgcagcaatgcagctcaaaacgcttagcctagccacacccccacgggaaacagcagtgattaacctttagcaataaacgaaagtttaactaagctatactaaccccagggttggtcaatttcgtgccagccacaccctggagctagcaaaaaaaaaaaaaaaaaaaaaaaaaaaaaagcatatgactaaaaaaaaaaaaaaaaaaaaaaaaaaaaaaaaaaaaaaaaaaaaaaaaaaaaaaaaaaaaaaaaaaaaaa

SEQ ID NO: 17360 - protein, 1273 aa, synthetic construct
  REGION 1..1273: note = Description of Artificial Sequence: Synthetic polypeptide
MFVFLVLLPLVSSQCVNLTTRTQLPPAYTNSFTRGVYYPDKVFRSSVLHSTQDLFLPFFSNVTWFHAIHVSGTNGTKRFDNPVLPFNDGVYFASTEKSNIIRGWIFGTTLDSKTQSLLIVNNATNVVIKVCEFQFCNDPFLGVYYHKNNKSWMESEFRVYSSANNCTFEYVSQPFLMDLEGKQGNFKNLREFVFKNIDGYFKIYSKHTPINLVRDLPQGFSALEPLVDLPIGINITRFQTLLALHRSYLTPGDSSSGWTAGAAAYYVGYLQPRTFLLKYNENGTITDAVDCALDPLSETKCTLKSFTVEKGIYQTSNFRVQPTESIVRFPNITNLCPFGEVFNATRFASVYAWNRKRISNCVADYSVLYNSASFSTFKCYGVSPTKLNDLCFTNVYADSFVIRGDEVRQIAPGQTGKIADYNYKLPDDFTGCVIAWNSNNLDSKVGGNYNYLYRLFRKSNLKPFERDISTEIYQAGSTPCNGVEGFNCYFPLQSYGFQPTNGVGYQPYRVVVLSFELLHAPATVCGPKKSTNLVKNKCVNFNFNGLTGTGVLTESNKKFLPFQQFGRDIADTTDAVRDPQTLEILDITPCSFGGVSVITPGTNTSNQVAVLYQDVNCTEVPVAIHADQLTPTWRVYSTGSNVFQTRAGCLIGAEHVNNSYECDIPIGAGICASYQTQTNSPRRARSVASQSIIAYTMSLGAENSVAYSNNSIAIPTNFTISVTTEILPVSMTKTSVDCTMYICGDSTECSNLLLQYGSFCTQLNRALTGIAVEQDKNTQEVFAQVKQIYKTPPIKDFGGFNFSQILPDPSKPSKRSFIEDLLFNKVTLADAGFIKQYGDCLGDIAARDLICAQKFNGLTVLPPLLTDEMIAQYTSALLAGTITSGWTFGAGAALQIPFAMQMAYRFNGIGVTQNVLYENQKLIANQFNSAIGKIQDSLSSTASALGKLQDVVNQNAQALNTLVKQLSSNFGAISSVLNDILSRLDPPEAEVQIDRLITGRLQSLQTYVTQQLIRAAEIRASANLAATKMSECVLGQSKRVDFCGKGYHLMSFPQSAPHGVVFLHVTYVPAQEKNFTTAPAICHDGKAHFPREGVFVSNGTHWFVTQRNFYEPQIITTDNTFVSGNCDVVIGIVNNTVYDPLQPELDSFKEELDKYFKNHTSPDVDLGDISGINASVVNIQKEIDRLNEVAKNLNESLIDLQELGKYEQYIKWPWYIWLGFIAGLIAIVMVTIMLCCMTSCCSCLKGCCSCGSCCKFDEDDSEPVLKGVKLHYT

SEQ ID NO: 17361 - RNA, 4283 nt, synthetic construct
  misc_feature 1..4283: note = Description of Artificial Sequence: Synthetic polynucleotide
  source 1..4283: mol_type = other RNA
agaataaactagtattcttctggtccccacagactcagagagaacccgccaccatgttcgtgttcctggtgctgctgcctctggtgtccagccagtgtgtgaacctgaccaccagaacacagctgcctccagcctacaccaacagctttaccagaggcgtgtactaccccgacaaggtgttcagatccagcgtgctgcactctacccaggacctgttcctgcctttcttcagcaacgtgacctggttccacgccatccacgtgtccggcaccaatggcaccaagagattcgacaaccccgtgctgcccttcaacgacggggtgtactttgccagcaccgagaagtccaacatcatcagaggctggatcttcggcaccacactggacagcaagacccagagcctgctgatcgtgaacaacgccaccaacgtggtcatcaaagtgtgcgagttccagttctgcaacgaccccttcctgggcgtctactaccacaagaacaacaagagctggatggaaagcgagttccgggtgtacagcagcgccaacaactgcaccttcgagtacgtgtcccagcctttcctgatggacctggaaggcaagcagggcaacttcaagaacctgcgcgagttcgtgtttaagaacatcgacggctacttcaagatctacagcaagcacacccctatcaacctcgtgcgggatctgcctcagggcttctctgctctggaacccctggtggatctgcccatcggcatcaacatcacccggtttcagacactgctggccctgcacagaagctacctgacacctggcgatagcagcagcggatggacagctggtgccgccgcttactatgtgggctacctgcagcctagaaccttcctgctgaagtacaacgagaacggcaccatcaccgacgccgtggattgtgctctggatcctctgagcgagacaaagtgcaccctgaagtccttcaccgtggaaaagggcatctaccagaccagcaacttccgggtgcagcccaccgaatccatcgtgcggttccccaatatcaccaatctgtgccccttcggcgaggtgttcaatgccaccagattcgcctctgtgtacgcctggaaccggaagcggatcagcaattgcgtggccgactactccgtgctgtacaactccgccagcttcagcaccttcaagtgctacggcgtgtcccctaccaagctgaacgacctgtgcttcacaaacgtgtacgccgacagcttcgtgatccggggagatgaagtgcggcagattgcccctggacagacaggcaagatcgccgactacaactacaagctgcccgacgacttcaccggctgtgtgattgcctggaacagcaacaacctggactccaaagtcggcggcaactacaattacctgtaccggctgttccggaagtccaatctgaagcccttcgagcgggacatctccaccgagatctatcaggccggcagcaccccttgtaacggcgtggaaggcttcaactgctacttcccactgcagtcctacggctttcagcccacaaatggcgtgggctatcagccctacagagtggtggtgctgagcttcgaactgctgcatgcccctgccacagtgtgcggccctaagaaaagcaccaatctcgtgaagaacaaatgcgtgaacttcaacttcaacggcctgaccggcaccggcgtgctgacagagagcaacaagaagttcctgccattccagcagtttggccgggatatcgccgataccacagacgccgttagagatccccagacactggaaatcctggacatcaccccttgcagcttcggcggagtgtctgtgatcacccctggcaccaacaccagcaatcaggtggcagtgctgtaccaggacgtgaactgtaccgaagtgcccgtggccattcacgccgatcagctgacacctacatggcgggtgtactccaccggcagcaatgtgtttcagaccagagccggctgtctgatcggagccgagcacgtgaacaatagctacgagtgcgacatccccatcggcgctggaatctgcgccagctaccagacacagacaaacagccctcggagagccagaagcgtggccagccagagcatcattgcctacacaatgtctctgggcgccgagaacagcgtggcctactccaacaactctatcgctatccccaccaacttcaccatcagcgtgaccacagagatcctgcctgtgtccatgaccaagaccagcgtggactgcaccatgtacatctgcggcgattccaccgagtgctccaacctgctgctgcagtacggcagcttctgcacccagctgaatagagccctgacagggatcgccgtggaacaggacaagaacacccaagaggtgttcgcccaagtgaagcagatctacaagacccctcctatcaaggacttcggcggcttcaatttcagccagattctgcccgatcctagcaagcccagcaagcggagcttcatcgaggacctgctgttcaacaaagtgacactggccgacgccggcttcatcaagcagtatggcgattgtctgggcgacattgccgccagggatctgatttgcgcccagaagtttaacggactgacagtgctgcctcctctgctgaccgatgagatgatcgcccagtacacatctgccctgctggccggcacaatcacaagcggctggacatttggagcaggcgccgctctgcagatcccctttgctatgcagatggcctaccggttcaacggcatcggagtgacccagaatgtgctgtacgagaaccagaagctgatcgccaaccagttcaacagcgccatcggcaagatccaggacagcctgagcagcacagcaagcgccctgggaaagctgcaggacgtggtcaaccagaatgcccaggcactgaacaccctggtcaagcagctgtcctccaacttcggcgccatcagctctgtgctgaacgatatcctgagcagactggaccctcctgaggccgaggtgcagatcgacagactgatcacaggcagactgcagagcctccagacatacgtgacccagcagctgatcagagccgccgagattagagcctctgccaatctggccgccaccaagatgtctgagtgtgtgctgggccagagcaagagagtggacttttgcggcaagggctaccacctgatgagcttccctcagtctgcccctcacggcgtggtgtttctgcacgtgacatatgtgcccgctcaagagaagaatttcaccaccgctccagccatctgccacgacggcaaagcccactttcctagagaaggcgtgttcgtgtccaacggcacccattggttcgtgacacagcggaacttctacgagccccagatcatcaccaccgacaacaccttcgtgtctggcaactgcgacgtcgtgatcggcattgtgaacaataccgtgtacgaccctctgcagcccgagctggacagcttcaaagaggaactggacaagtactttaagaaccacacaagccccgacgtggacctgggcgatatcagcggaatcaatgccagcgtcgtgaacatccagaaagagatcgaccggctgaacgaggtggccaagaatctgaacgagagcctgatcgacctgcaagaactggggaagtacgagcagtacatcaagtggccctggtacatctggctgggctttatcgccggactgattgccatcgtgatggtcacaatcatgctgtgttgcatgaccagctgctgtagctgcctgaagggctgttgtagctgtggcagctgctgcaagttcgacgaggacgattctgagcccgtgctgaagggcgtgaaactgcactacacatgatgactcgagctggtactgcatgcacgcaatgctagctgcccctttcccgtcctgggtaccccgagtctcccccgacctcgggtcccaggtatgctcccacctccacctgccccactcaccacctctgctagttccagacacctcccaagcacgcagcaatgcagctcaaaacgcttagcctagccacacccccacgggaaacagcagtgattaacctttagcaataaacgaaagtttaactaagctatactaaccccagggttggtcaatttcgtgccagccacaccctggagctagcaaaaaaaaaaaaaaaaaaaaaaaaaaaaaagcatatgactaaaaaaaaaaaaaaaaaaaaaaaaaaaaaaaaaaaaaaaaaaaaaaaaaaaaaaaaaaaaaaaaaaaaaa

SEQ ID NO: 17362 - protein, 26 aa, synthetic construct
  REGION 1..26: note = Description of Artificial Sequence: Synthetic peptide
MRVMAPRTLILLLSGALALTETWAGS

SEQ ID NO: 17363 - protein, 55 aa, synthetic construct
  REGION 1..55: note = Description of Artificial Sequence: Synthetic polypeptide
IVGIVAGLAVLAVVVIGAVVATVMCRRKSSGGKGGSYSQAASSDSAQGSDVSLTA

SEQ ID NO: 17364 - DNA, 4107 bp, synthetic construct
  misc_feature 1..4107: note = Description of Artificial Sequence: Synthetic polynucleotide
  source 1..4107: mol_type = other DNA
atgagggtaatggctccgcgcacccttatattgcttctgtctggggcgcttgcgcttacggaaacttgggcagggtctggtgggtctggaggtggtggttccggcgggagtgataatggacctcagaaccaacgcaacgcacccaggatcacatttggtgggccatccgactccactggcagcaaccaaaacggtgaacgaagtggcgcgagatccaagcagcgccgccctcaaggtttgccgaataacacagccagctggttcactgccttgactcagcatggcaaggaagatttgaaattcccacgaggacagggtgtccctataaatacgaattccagtcccgatgatcagatcggttattatagaagagctacaaggcgaatccggggcggggatggcaagatgaaagacctgagcccgcgctggtatttctattacctgggaactggacctgaagcgggcctcccttatggtgcgaataaagacggaataatctgggtggctacggaaggggccctgaacacgcccaaggatcacatcggcacacgcaatccggcgaacaatgccgcgatagtgctgcagctgccacaaggcaccacactgccaaaggggttttacgcagaaggctccagaggtgggtcacaagcctcttctcgatcctcttcccggagcagaaatagctcacgaaactccaccccgggcagttccagaggcacaagtcctgctcgcatggcaggtaatggaggtgacgccgctctcgcgcttcttctcctcgacagactgaatcagcttgagagtaaaatgagtggaaagggacagcagcaacaggggcaaacagtgaccaaaaaatcagctgcggaagccagcaagaagccgcgccagaaacggacagcgactaaagcctacaatgttacccaagccttcggccgcagagggccggagcaaactcagggcaacttcggcgatcaggaactgatccgccagggaacagattataaacattggccccaaatcgcacaatttgcaccctccgcgtctgcgttcttcggcatgagccggattggtatggaagtaacaccgagcggcacctggcttacatatacaggcgcgattaaattggatgacaaggatcccaattttaaggaccaagtgatattgctcaacaaacatattgatgcgtataagacttttcctcctactgaaccaaagaaggataagaaaaaaaaggctgatgaaacacaagctcttcctcaacgccagaaaaagcaacagacagttaccttgctcccggcggccgatcttgatgatttttccaagcagctgcaacagtctatgtcatcagccgactctacccaagcaggcggttcaggtggcggcggttctggtggcgaccctaagatatccgaaatgcaccccgcactcagactggtagacccccaaatacaactggcggttacacggatggagaacgcggttggcagggaccagaataacgtggggccaaaggtgtatcctatcatcctcagattgggtagtcccctcagcttgaatatggctagaaaaacactgaattcattggaagacaaggcgttccaactgacaccgattgcggtgcagatgacaaagctcgctacaaccgaggaactcccagacgagtttgtagtagtcacagtcaagggtggctcaggcggcggaggctcaggtggataccatttttttcatacgacggatccatcttttctcggccgatatatgagcgcgctcttcgcagacgatctgaatcagctcacgggataccacacagacttcagtagtgaaattatcggttatcagttgatgtgccagccgatattgttggctgaggctgaacttgctaagaatgtctccctcatcttggggacagtcagctggaaccttaaacgccgctacttgctgtctgcgggtatctttggggctattacggatgtattttacaaagaaaacagctataaagtaccgaccgacaattacatcacgacttatgcacgcatggcggcaccaaaggaaatcatatttcttgagggggaaactctgttcggagacgatacagtaatagaagtcgctattatacttgcttcattttcagccagtactcgacgcatggctatggtgaccaataatactttcacgctgaaggttcctcatgtgggcgaaatccccgtcgcctatcgcaaggtcctgctcaagactattcaacctcgcgttgaaaagtaccttttcgatgaaagcggggaatttaaactcagcgaagtgggccctgaacactcactcgcagaatattatattttctttgcctccttttattataaacggaatggcggcggctctggcggaggtgggtctggtggcgatctctttatgcggatctttacaatagggaccgttacattgaagcaaggggaaatcaaggacgccacaccgtccgatttcgttagagcaaccgccacgattcctatccaggcatccttgcccttcgggtggctgatagtaggtgtagcactccttgcagtctttcaaagcgcatccaaaatcattaccctcaagaaacgctggcagcttgccctttctaagggagtacatttcgtatgtaatctgttgctcctgttcgttacagtttatagccatctcttgctcgttgccgctgggctggaagccccatttttgtacctgtacgcccttgtgtattttcttcaaagcataaatttcgtgaggattatcatgcgcctctggctgtgctggaaatgccgctcaaaaaatccacttctttatgacgcaaactattttctctgttggcatacaaattgttacgattattgtataccttacaacagtgtgacgtcctccatagtcatcaccagcggagatggtacaacgtcacccatttctgagcacgactaccaaataggcggctatacggagaagtgggaatctggtgtaaaagattgcgtggtgcttcactcttattttacttcagattactaccagctttatagcactcaactttctaccgatacaggagtggaacacgtcacattttttatatacaacaagattgtcgatgaacccgaagaacacgtgcaaatacatacaatcgacggctcctcaggagtcgtcaatccagtcatggaaccaatctacgatgagccgacaactaccactagtgtaccgctcgggggaagcgggggcggaggtagcggcggagcagacagtaatggtactataactgtggaggagctcaagaagctccttgagcaatggaatctggtcataggttttctgtttcttacctggatatgccttcttcagttcgcctatgcgaatcgcaaccgcttcctgtacatcataaagctcatattcctctggctgctctggccggttactcttgcctgttttgttcttgctgctgtataccgcattaattggataacggggggaatagcgatcgcgatggcatgcttggtgggattgatgtggctgagctactttatagcgtcatttaggctttttgcgaggactagatccatgtggtcctttaatcccgaaactaacattcttctcaatgtaccgttgcatggaactattttgactagaccccttctcgagagtgagctggtgataggagccgtgatactcaggggtcatctccggattgccggtcaccatttgggtagatgtgacataaaagatctcccaaaggaaattacggtagctacgtctcgaaccctttcatactacaaactcggtgctagccagcgagtggctggggatagcggcttcgcggcgtattctcgctacagaattggaaactacaagttgaatacggaccactcatcaagtagcgataacattgcactgcttgtgcagggtggtagtctcggggggggcggatccggtatcgtgggcatagttgcgggtctcgctgtgctggctgtggtcgtgatcggcgcggtcgtagctaccgtgatgtgtaggcggaaaagcagtggtggtaaaggtggatcatatagtcaggctgcatcatctgattccgctcaaggaagcgacgtcagcctgacagcttgataa

SEQ ID NO: 17365 - DNA, 4107 bp, synthetic construct
  misc_feature 1..4107: note = Description of Artificial Sequence: Synthetic polynucleotide
  source 1..4107: mol_type = other DNA
atgcgagtcatggcgccgcgcaccctgatacttctgcttagcggcgctttggccctcaccgagacatgggctggcagcggtggttctggaggcggaggatcaggcggagcggacagcaatggcacgatcactgtggaggagctcaaaaaacttttggaacaatggaatttggtaattggtttcttgtttcttacttggatatgcctgcttcagttcgcctatgcgaacagaaatagatttttgtatatcattaaattgatatttctttggttgctttggcctgttactctggcttgtttcgtcctcgctgcggtttatcggataaattggattacgggtggaatcgcaattgccatggcctgtctggtcggtctgatgtggctttcctacttcatagcatcatttaggctgttcgcgagaacgcgaagcatgtggagtttcaaccccgagacgaatatccttttgaacgtgcctcttcatggcactattctcactcgacctctgcttgaatccgagctcgtcatcggcgcggtaatcctccggggtcatctgcggatcgcaggtcaccacctcgggcggtgtgatatcaaggatcttccgaaagaaattaccgtagctacttcacgcacactcagctactacaagctgggtgcttcacaaagagtcgccggtgattctggtttcgctgcgtatagcaggtaccgaataggaaattacaagctcaataccgatcattcctccagctcagataacatagccctgcttgtgcaagggggatccggaggaggaggttcaggcggtgacttgtttatgaggatctttaccatcggaacagtgacactcaaacaaggggaaataaaggacgccactccgtcagactttgttagagcaacagcgactattccgattcaagccagccttcctttcgggtggctcatagtgggcgtcgcattgctggcggtgtttcagagtgcgagtaagatcataaccctcaaaaagcggtggcagttggcgttgtctaaaggggtacattttgtctgcaaccttctgctcctgttcgtaacagtttattctcacctgctgttggttgcggccggtctggaggccccatttctttatctttacgcacttgtttatttccttcaatccataaatttcgttcggatcatcatgagattgtggctctgctggaagtgcagatccaaaaaccctctcctctacgacgcgaattatttcttgtgttggcacacaaattgctatgactattgcataccgtataactccgtcacttcttcaatcgtaatcacctcaggcgacggaaccacatctcccatctctgagcacgactaccagattggcggatatactgaaaagtgggaatccggtgtaaaggactgcgtagtactccactcatacttcactagtgattactatcaactctacagcacccagttgagcactgatacgggggtcgagcatgtaaccttcttcatctataacaaaatagttgacgagccagaggagcatgtacaaatacataccattgacggttcttctggagtcgtgaatccggtaatggaacctatttatgatgaacccacaactactacaagtgtaccccttggaggcagcggcgggggtgggtctggcggatatcatttctttcacacgacggaccctagttttcttggtaggtatatgagcgctctttttgcggatgatctcaatcagcttacgggctaccacacggacttcagtagtgaaataatcgggtatcaattgatgtgccaacctattctgctcgcggaggcagaactcgccaagaacgtttctctgatcctcggcacggtatcttggaatcttaaaaggagataccttctgagcgcaggcatttttggcgcaataacagatgtgttttacaaagaaaatagctataaggttcctacagacaactacataaccacatatgcaaggatggcagccccgaaagaaattatattcttggagggggagactttgttcggtgacgacacagtcatagaggtagcaattatactcgcgagcttctccgcgtctactagacgaatggcgatggttaccaacaacacgtttacgttgaaggtcccccacgttggcgaaatacccgtcgcttacagaaaggtacttctcaagacgatacaaccacgggtggagaagtatctcttcgacgaaagtggggagtttaagctttcagaagttgggccggaacactccttggcggaatactatattttttttgcgtcattttattacaagaggaatggggggggttctggggggggtggatctggcggggatcctaagatctctgagatgcaccctgccctgcgccttgtggatccacagatacagttggctgtcacgagaatggagaatgcggtgggcagggatcagaataacgttggtccaaaggtatacccgatcattctccgacttggatctcccctctctctgaacatggccaggaagacgctcaacagtctcgaggataaggcttttcagctcacgccgattgcagtgcaaatgacaaaactcgccactacagaggaacttccagatgaatttgtcgttgtaaccgttaaaggaggttcaggcgggggtggctccggcgggagtgacaacgggccgcaaaatcagagaaatgcacctcgcataacgttcggaggaccgtccgactctaccgggagcaaccaaaatggggagcggagcggtgcgcgaagcaaacaacgacggccgcagggtctgccgaacaacacggcttcctggtttacagcgttgactcagcatgggaaagaggaccttaaattcccacgggggcagggggttcctattaacacaaattctagtccagacgaccaaatcggatattatcgcagagctacacgcaggattaggggaggtgatggcaaaatgaaagacttgtcaccgaggtggtatttttattacctcggtacaggccctgaagctggcctcccgtatggagcgaataaggatggcatcatttgggtcgccaccgaaggcgctttgaatacacctaaagatcatatcggcacaagaaaccccgcgaacaatgcagcaatagtattgcaactccctcaggggaccactttgcctaaaggtttctacgccgaaggtagccgaggcggttcacaagcgagtagtagatctagctctcggtctcggaactctagtaggaatagcacacctggttcttcacgcggcaccagcccggctagaatggcgggtaacggcggcgacgcagctttggcattgctgcttctggacagactcaaccaacttgaatctaaaatgagcggtaaggggcaacagcaacaagggcaaactgttacgaaaaaatcagctgcggaagcgtccaaaaaaccacgacagaaacggacggccactaaggcttacaatgtgacacaagcttttggtagacggggccctgaacagacgcaaggtaacttcggtgatcaagaactgattcgacaaggaacagattacaagcactggccacaaattgcacaattcgcccccagcgcgtcagctttctttgggatgagccgcattggaatggaagtcaccccgagcggaacctggctcacctatacgggggcaatcaaactcgatgataaagaccctaatttcaaggatcaggttattttgcttaataagcacatagacgcatataaaacctttccaccgacggaacctaaaaaggacaagaaaaaaaaggcagatgagacgcaagcactccctcagagacaaaagaagcaacagacggtgacattgctcccagcggcagatttggatgatttcagtaagcagttgcagcaatctatgtcttccgcggattccactcaggcaggtgggtctttgggcggcggaggttccggaattgttggcatagtggcgggcctcgctgtgttggccgtggttgtcataggagcagtcgttgccacggtcatgtgtagaaggaagtcatcaggtgggaaggggggcagttattcacaggcggcgagttccgacagtgcgcagggtagcgacgtatcactcactgcctagtaa

SEQ ID NO: 17366 - DNA, 4287 bp, synthetic construct
  misc_feature 1..4287: note = Description of Artificial Sequence: Synthetic polynucleotide
  source 1..4287: mol_type = other DNA
atgcgcgtcatggccccacgaactttgatacttctgctgtccggcgcattggcccttacggaaacgtgggcgggaagcggcggctccggcggaggaggcagtggcggttctgataacggaccgcaaaatcaaaggaatgccccgaggataaccttcggcggacccagtgattctaccggctctaatcagaacggagaacgatccggcgctagatcaaaacaacgacgaccgcaggggttgccgaacaatactgcgagctggtttacggccctgacccaacatgggaaggaagatctcaaatttccgcgcggtcaaggggtccctattaacaccaatagttctcctgacgatcaaattggatactaccggagagccacccgacgaatacgcggaggagatggtaaaatgaaagatctttccccacgctggtatttctattacctcgggacaggaccagaagcgggattgccttatggtgctaataaagatggtatcatttgggtagcgacagaaggtgcgctgaatacgccgaaagatcacatcgggacacgcaacccagctaataatgccgctatcgtattgcaactgccccaaggaacaacgctgcctaagggattttatgcagagggaagtcggggggggtctcaagcctcatctcggagcagttcccgcagtcgaaattcctctcgcaattccacaccaggaagttcccgaggaacttcaccggcaagaatggcggggaacggcggtgatgctgcccttgctctgcttttgctcgatcgcctcaaccagcttgaaagcaagatgtctgggaagggacaacaacagcagggccaaacggtcacaaagaaaagtgccgccgaagcctccaagaaaccacgacaaaagcggacagccactaaagcttacaacgtgactcaagctttcggtcgacggggccctgagcagacccaagggaatttcggagatcaagaactgatacggcaagggacggattacaagcactggccccaaattgcccagtttgctccttctgcatctgcctttttcggtatgtcacggatcggaatggaggtaacgccgtccggaacatggctgacttatacaggagccattaaactcgacgataaagatcctaactttaaagatcaggttatactgctcaacaaacacatagatgcatacaaaactttcccccctacggaaccaaagaaggataagaagaagaaagctgacgagacgcaggccctcccgcaaagacaaaagaaacaacagactgtcaccctgttgccggcggctgatctggacgacttcagcaagcaattgcagcaatccatgtctagtgcagactccactcaggccggaagtggtggttccggggagggtagggggtctctcttgacatgtggcgacgtggaagaaaaccctgggcctgatcccaagatttcagaaatgcacccagctctcagactggtggaccctcaaatacagcttgcggtaacaagaatggaaaacgctgtagggcgcgaccagaataacgtcgggccaaaggtttaccccataattctgcgacttggtagtcctctttccctgaatatggcgcgcaaaacactgaattcattggaggataaggcgtttcaacttacgcctatagcagtccaaatgacgaaactggcaaccacagaagaactcccggacgagtttgttgtagtgaccgttaaagggagtgggggcagcggagccaccaacttctcactcctcaaacaagcaggtgacgtcgaagagaatcccggaccctaccacttcttccacaccactgacccgagcttcctgggtagatacatgtctgccctctttgcagacgatttgaatcaacttactggttaccatactgacttttcaagtgaaataattggctaccagctcatgtgtcaacccatcctgcttgcggaagcggaattggccaaaaatgtgtccctcatactggggacagtcagttggaacttgaagcggcgctacctcctgtcagccggtatttttggggcaatcacagatgtattctacaaagagaactcatacaaagtgcctacggacaactatataactacttatgctagaatggctgctccaaaagaaataatttttctggagggcgagactctctttggtgacgacacggtcattgaggtagcgataatacttgcgagcttctctgccagtacaagacgaatggctatggtaacgaacaacacatttacgttgaaggtgccgcacgttggagaaatccccgttgcatatcgaaaagttttgctgaaaaccattcagcctcgagtagagaaatacttgttcgacgaatccggtgagtttaaactgagcgaagtaggccccgaacactccctcgcagaatactatatatttttcgcttccttttactataaaagaaacggtggcagtggtgtcaagcaaaccctgaacttcgatctcctcaagttggcaggggatgtagagtctaaccctggtccggaccttttcatgaggatctttactatcggtacggtcaccctcaaacaaggcgagataaaagacgccacgccctcagacttcgtgcgagctactgcaaccatcccaatacaggcaagcctgccctttggctggttgatcgtcggggtggcactcctggctgtgtttcagagtgcgtcaaagataattactttgaagaagaggtggcaattggcactctccaaaggtgtccactttgtttgcaatttgcttctcctgtttgtcaccgtctacagccaccttctgctggtcgctgctggcctggaagcaccgttcctgtacctttatgccttggtgtacttcctccagagcattaactttgttagaatcatcatgcgcttgtggctgtgttggaaatgtcggtccaagaacccgctcctctatgatgcaaattatttcctttgttggcatacgaattgctatgactactgtattccatataattctgtaacgtcatcaattgttataacgagcggagacggtacgacctcccctattagcgaacatgattaccaaattggtggctacaccgaaaaatgggaatcaggagtaaaagactgcgttgtgttgcatagttattttaccagtgactattaccaattgtactcaactcaactgagcactgacacaggtgtggagcacgttaccttcttcatttacaacaagattgtggacgagcccgaagaacacgtgcagattcatacaattgatgggtccagtggtgttgtcaatccggtcatggagcccatatacgatgagccgactaccacaacttccgtgccgctcgggagcggcggatcaggacaatgcacaaattacgcactcttgaagttggccggtgatgtagaaagcaatcctggtccggccgacagcaacggaaccataactgtagaggaattgaaaaagctcctggaacaatggaatctcgtgatcggtttcctcttccttacatggatctgtttgcttcagtttgcgtatgctaatcgcaatcgctttctgtatatcataaaacttattttcctttggctcctgtggcccgtaacgctggcctgcttcgtgcttgcggcggtatatagaattaactggatcactggcggcatagcgatcgctatggcatgcttggtggggctcatgtggttgagctactttattgcatcttttagattgttcgcgcgaacgcgatccatgtggagttttaatcctgaaacgaatatattgctgaatgtacctttgcatggaacaattttgacgcgccccttgttggaaagcgaactcgtcataggcgctgtgatattgaggggacacctgcggatcgcgggtcaccacctcggacgatgcgatattaaggatctgcccaaagagatcacggtagccacctcccgaaccctgagttactacaagcttggtgctagccaacgagtggctggggactcaggtttcgcggcctatagtcgatatcgcatcggcaattacaagctgaatacggaccattctagtagtagtgataatatcgctctcctggtacaagggggaagcctcggtggagggggatccggtattgtcggaattgtcgccggtttggctgtgctggcagtagtagtgattggagcagttgtcgctactgtaatgtgcagaagaaagtccagcggcggcaaagggggatcttatagccaggcggcaagtagtgattcagcgcagggatccgatgtgagcttgacggcttagtaa

SEQ ID NO: 17367 - DNA, 4011 bp, synthetic construct
  misc_feature 1..4011: note = Description of Artificial Sequence: Synthetic polynucleotide
  source 1..4011: mol_type = other DNA
atgcgggttatggccccgcggacccttatcctccttctctcaggcgcacttgccttgaccgaaacgtgggctgggagcgggggatctggtggtgggggttcagggggctccgacaatggacctcagaaccagaggaatgcccctagaattacttttggtgggccttctgactccacgggctccaaccaaaacggcgaacgatctggcgccagatcaaagcagcggaggcctcagggcttgccgaacaacaccgcctcctggttcacagccctgacccagcatggcaaggaagacctcaaatttccaagaggccagggcgttccaatcaacacgaatagcagccctgatgatcaaataggttattacagaagagccaccagaaggatcagaggaggcgatgggaaaatgaaggaccttagcccaaggtggtacttctactatctcggaaccgggcctgaagctgggttgccttacggcgccaataaggacggtataatatgggttgctacagaaggggcgcttaacactcccaaagatcatatcggtacgcgaaatcccgcaaacaatgccgcaatagtgttgcagctgccgcaaggaacaacgctccccaagggattttatgcagagggttctcggggaggcagtcaggcatcaagccgctccagttcaagatcacgaaatagctctaggaattctactccaggcagttcacgaggaacgtctccggcccgaatggccgggaatgggggcgatgccgctttggcgcttttgctgctggataggctcaaccaactggagagtaaaatgagtggaaaaggccagcagcaacaagggcagactgtcactaagaagtcagcagccgaagcaagcaagaaaccacgacaaaagcggaccgcgactaaggcatataatgtaacgcaggccttcggaagacgagggccagagcaaacccaaggcaacttcggtgaccaagaattgatcaggcaaggcaccgattataaacattggccgcaaatcgcgcaatttgctcctagcgcaagcgcctttttcggcatgagcaggattggcatggaagtcacaccaagtggaacatggctcacgtatacgggggcaattaaactcgatgacaaggacccgaatttcaaggatcaagtgattttgttgaacaagcacatagacgcgtacaaaactttcccgccaactgagcccaagaaggataaaaaaaagaaagcagacgagacacaggcactcccgcagcgacaaaagaaacaacagacggtgacgcttctgccagctgccgacctcgacgatttctccaagcaacttcagcaatcaatgtcaagcgcagattctactcaagcctttagagcttgcatggtcactaacaatacatttacactcaaggtaccgcatgtaggggaaattcccgtggcctaccggaaggtactgctcaaaacgattcaacctagggtagaaaaatatcttttcgatgaatcaggcgaatttaagcttagcgaagtgggcccagaacatagcctcgctgagtattatatttttttcgcgtccttttattataagagaaatggcgatcccaagatttcagaaatgcatcctgcccttcgcctcgtggatcctcaaatccagctcgccgttacaagaatggagaacgcggtaggtagagatcagaataatgttgggcctaaagtctatccgattattttgcggttgggcagccccctgagtttgaacatggctcgcaagaccttgaattcacttgaggacaaggcattccagctgacgcctattgcggtacagatgaccaagctggcaaccacggaagaactgccggatgagtttgtagtcgtcaccgtaaagtttaactccttccataccactgatcccagttttttggggcggtacatgagtgcccttttcgcggacgatcttaatcaactcacgggctatcacacagacttttccagtgaaatcatcgggtatcaactcatgtgtcagcccattctgctcgctgaggctgagctggcaaagaacgttagcttgatacttgggacggtgtcttggaacctcaaaaaacagggcgatctttttatgaggatttttacgattggtaccgtaacgcttaaacaaggagagattaaggacgcaaccccgagtgactttgtcagggcgacagcgaccatccctattcaagcaagcctgccttttggctggctcatagtcggggtcgctctgcttgctgtattccagagtgccagtaaaatcatcactcttaaaaagcgatggcagctggcccttagtaagggggtccatttcgtctgcaaccttctgcttttgtttgtcaccgtgtactctcatttgctcctggtggccgctggactggaggctcctttcctctacctttacgcccttgtttattttcttcaatccatcaatttcgtgcgaattataatgcgcctctggttgtgctggaagtgccggagcaaaaatcctctgctctacgatgctaactactttttgtgttggcacacgaattgctacgactactgcataccttacaattccgtgacctcatcaattgtgataacgagcggtgacggaacgacatcaccaatttctgagcatgactaccagattggtggctacacggaaaaatgggaatctggcgtcaaggactgtgtggtcctgcattcctattttacgagcgactattatcagctttactccacgcaacttagtacggacaccggtgtcgagcatgtcacgttttttatttacaataagattgttgatgaacctgaagaacacgtgcagatacataccattgacggctcttctggagttgtgaaccctgtcatggagcctatctacgacgagccaacaactacgacttccgtacctctgagaagaagctacttgttgtcagccgggatattcggtgcgatcaccgacgtcttctataaggagaatagttataaggtccctacagataattatattaccacctatgcgaggatggcggctcctaaggagattatattcttggagggggaaaccctgtttggcgatgacaccgtgatcgaggtggccattatacttgcatcattttctgccagtactctcttggtacaggctgatagtaatgggacaataacggttgaagaacttaaaaagcttctggaacagtggaacttggtcattggatttctgttcctcacgtggatttgcctcttgcaattcgcttatgcaaataggaatcggtttctttatatcatcaagttgatattcctctggctcctgtggccagtgactcttgcttgctttgtcctggctgccgtttaccgaataaattggataaccggtggtatcgcaatagctatggcctgtttggtgggtctgatgtggttgtcttacttcatagcatcattccgcttgttcgctagaactagatccatgtggtccttcaaccctgaaactaatattcttctgaatgtgcctcttcacggtacaattttgacacgaccactcctcgaaagcgaacttgtaattggggccgtgatcttgaggggccaccttaggattgcagggcaccacttgggcagatgcgacattaaggatttgccaaaagaaataacggtcgcgacttctcggacattgagttactacaaattgggtgcatcccaacgggtggcgggtgatagtgggtttgcggcctactctaggtatcgaatcggaaattacaagcttaacaccgaccattcaagtagttctgacaacatagctcttctggttcagggtggttctctgggtgggggaggctccgggattgtcgggattgtcgccggtcttgctgtacttgccgtggtggtaatcggagcagtcgtagctacagtgatgtgccgcagaaagagttctgggggtaaaggcggatcttatagccaggcagcaagcagtgattccgcacaaggatccgatgtgagtcttaccgcctgataa

SEQ ID NO: 17368 - DNA, 2577 bp, synthetic construct
  misc_feature 1..2577: note = Description of Artificial Sequence: Synthetic polynucleotide
  source 1..2577: mol_type = other DNA
atgcgcgtaatggcgccacgaacgttgattctgttgttgagtggtgctctcgcgctcacggagacgtgggccggatcaggagggagcgggggtggtggctctggtggaaaggacctttctcctcggtggtatttttactatctggggaccggtcctgaagcggggttgccatatggcgccaacaaggatggcattatctgggtggcgacagagggcgcgcttaatacaccgaaggaccatataggaacgagaaatccagcgaacaatgctgcgattgtccttcagctgccgcaaggaacgaccttgcccaagggtttttacgccgagggctctagggggggctcccaagcatcatcccgatccagctcccggtctcgaaatagctcccggaatagcactcctggttcctcccggggaacgtccccagcgcgaatggcaggtaacgggggtgacgccgcattggctcttctcttgttggatagactgaatcagttggaatcaaagatgagcggaaagggacaacaacaacagggacaaaccgtaactaaaaaaagcgctgctgaggcgagtaaaaaaccgaggcaaaagcgaactgctacaaaagcgtataatgtcacacaagcctttggtcgcagaggtccagagcagactcagggtaacttcggagaccaggagttgatcagacaagggactgattacaagcactggccgcagatcgcgcaattcgctcccagcgcgagtgccttcttcggaatgtcaaggatcggaatggaggtcacgccctcaggcacctggctgacgtacacaggtgcaattaagctggacgataaggatcccaactttaaggatcaagtcatccttcttaacaaacacattgatgcctataaaaccttcccgcccacggagccgaagaaagataagaaaaaaaaagctgatgagacgcaggcgctgccacaaagacagaagaagcaacaaaccgtaaccctcctccctgcagcggacttggacgacttcagtaagcaactccagcaatccatgtccagtgcggatagtactcaggcgtttcgagcctgtatggttaccaacaacacattcactcttaaggtgccccatgttggggagatccccgtggcgtatagaaaagtactcttgaaaacgatccaacctcgcgtggagaaatacctctttgacgaatctggggaattcaaacttagcgaggtaggcccggaacattccctcgcagaatactatatttttttcgctagtttttactataagcgatgcttccatacgacagacccctcttttctgggacggtacatgtccgccttgtttgcggatgaccttaaccaattgacgggctaccatacagacttttcatccgaaataatcggttaccaactcatgtgtcagcctatactcctcgccgaagccgagctggcaaaaaatgtaagtctgattctgggtactgtgtcatggaatctgaagaagcgatatctcctttctgccggtatattcggtgcaataaccgacgtcttttataaggaaaacagttacaaagtaccgacagacaattatataaccacctatgcacgcatggccgcccccaaagaaatcattttccttgagggtgaaacgttgtttggggatgacacagttatagaggtggcgataatcctggcttcattcagtgcttctacgcgacgcagcggtgctgatagtaatggcacaattactgtagaagagttgaaaaaactgctggaacaatggaaccttgttataggctttttgtttttgacctggatatgtctcttgcagtttgcgtacgctaataggaacaggttcctgtacataatcaagctcatcttcttgtggctgctttggccagtaacacttgcctgttttgtgctggccgcggtttataggatcaactggataactggcgggatagcaatagctatggcgtgtctcgtcgggttgatgtggctgtcctattttatcgcatctttccgactttttgcacggaccagaagcatgtggtcctttaacccggagactaatattttgctcaatgtaccactgcacgggacaatactgacacgccccttgttggaatctgagttggtaataggggctgtaattctccgcggtcaccttaggattgcaggtcaccacctgggacgctgcgatataaaggatcttcctaaggaaattacggtagcaacgtcacgaactctcagttattataaacttggcgccagtcagcgagtcgctggcgatagcggattcgccgcgtactctagatacagaataggaaactacaaattgaacacggatcacagctcttcatcagacaatatcgcccttctcgtacagggaggctcactgggagggggcggcagtggtatagttggtattgtagcgggcttggcggtccttgcggtagttgttataggtgccgtcgtcgccactgtcatgtgcaggcggaaaagctctggtggaaagggcgggagctattcacaagccgcgtcctctgactctgctcagggttcagatgttagtcttacagcatgataa

SEQ ID NO: 17369 - DNA, 1521 bp, synthetic construct
  misc_feature 1..1521: note = Description of Artificial Sequence: Synthetic polynucleotide
  source 1..1521: mol_type = other DNA
atgcgcgtgatggcaccgaggacgcttattctcttgctgtcaggtgcgctcgccctcactgagacatgggcagggtctggaggtagtggcggcggtgggagcggaggaagaatggctgggaatgggggcgacgctgcgctcgcactcttgctgttggaccgactgaatcagctcgagagcaaaatgagtggtaaggggcaacaacagatgcgcgcgtgtatggtgactaacaacacctttacccttaaagtgccgcatgttggtgaaattcccgttgcctacagaaaggttctccttaaaaccattcagccgagagtcgaaaaatatttgttcgacgagagtggtgaatttaaacttagtgaagtaggtccggaacacagtttggctgagtataagatgtgcggatataagcattggccacaaatagcccagttcgccccttccgcctccgcctttttcggtatgtcccggattggaatggaagtgaccccatcaggaacttggctcacatacaccggggctatcaaacttgatgataaagatccaaatttcaaagaccaagttatcctgctgaataagcacatcgatgcgtacaaaacgttccccgcgcgatgcgccaccaccgatccctcctttcttggtagatatatgagcgcgttgtttgccgacgacctgaaccaactcacagggtaccatacggatttctcatcagaaatcataggttatcaactgatgtgccagccaatcctgctggcggaggccgagctcgccaagaatgtttcccttatactgggtactgtgagctggaacctgaaaaaacaggggtttgcctatgcaaacaggaacaggttcttgtacatcataaagttgattttcctttggttgctgtggccggtgacccttgcctgttttgtactggcggccgtctatagaatcaattggattaccggagggattgcaattgctatggcgtgtcttgtgggattgatgtggctcagttacttcatcgcctcattccgcttgttctaccgctcttacttgctgagcgctgggatttttggagcaataacagacgttttctataaggaaaattcatataaggtcccaacagataattacataaccacatacgcgcggatggccgcgcctaaggaaattatattccttgagggggagacgctttttggcgatgacaccgttatcgaggtttcaatgtttaatttgggaagatgtgatattaaggaccttcccaaggagatcaccgttgcaacctcacgcacgctcagctattataaacttggggctagccagcgggttgccgggggcagcttgggtggcgggggtagtggtatcgtgggaatagttgctggattggccgtactggctgttgtcgtgataggggcggtagtagcaacagttatgtgtagacgcaagtcctcaggcggtaaaggaggttcatacagccaggcggcatcatctgatagtgcccaggggtccgatgtctcacttaccgcctagtaa

SEQ ID NO: 17370 - DNA, 1785 bp, synthetic construct
  misc_feature 1..1785: note = Description of Artificial Sequence: Synthetic polynucleotide
  source 1..1785: mol_type = other DNA
atgcgggtaatggcaccacgcacgctgatccttcttctctccggtgcactcgctctgacggagacgtgggcgggaagtggtggatcagggggtggggggtctggaggcagtcccgctaggatggcaggaaatggaggtgatgccgcactggcccttttgttgctcgaccggcttaatcaacttgagtccaagatgagcggcaaaggtcaacaacagcaaggtcaaactgttaccaaaaagagcgcggcagaagcaagtaagaagccccgacaaaaaaggactgcaacgaaggcgtataacgtaacgcaggccttcggccgacgaggcccagaacagacacaggggaactttggggatcaggagctgataagacaaggtactgactacaaacactggcctcagattgctcaattcgctccaagtgccagtgcattcttcggaatgagccggatcgggatggaggtaactcccagcggaacatggttgacttacaccggagcgatcaaactggacgacaaggaccctaatttcaaggatcaggttatactgttgaacaaacatatcgacgcgtacaagacctttcctcccactgagcctaaaaaggacaagttcaaggcggccatggtaaccaacaacacctttacgttgaaagtaccccacgtaggtgaaataccggtggcctatcgaaaggtccttttgaagaccatccaaccccgcgttgaaaaatacctctttgacgagtctggtgaatttaaactcagcgaagtcggtcctgagcatagtttggcggaatattatattttttttgcaagtttttactataaaagaaatggcttcgcgtatgcaaatagaaatcggtttttgtacataattaagctgatatttctgtggctcttgtggccggtcacgctcgcgtgctttgtactcgcggcagtttacaggatcaactggattaccggaggtatagcaatagccatggcttgccttgttggcctcatgtggctttcatatttcatcgcaagttttagactcttctataatagttttcataccacagaccccagcttcttgggtagatacatgtccgcgctttttgccgatgacctcaaccagcttacagggtatcacactgacttttccagtgaaataattggatatcagctcatgtgtcagcccatcctgcttgcagaagctgagcttgcgaaaaatgtctccctcatcttggggacggtttcctggaatctcaaaaaaaatggactgggtcggtgcgacattaaggatctgccgaaagagatcacggtagctaccagcaggaccctgtcttattataagctcggggcttcccaacgagtggcttataggagttacttgctgagtgctgggatatttggtgcaattacagatgtcttctataaggagaactcatacaaagtacccactgataactacataacgacctacgcaagaatggctgcgcctaaagagattatatttttggaaggcgagacgttgttcggtgatgatactgttatagaagtagctattattttggcgagtttcagcgcgagtactcgacgacgagggggtggttctcttggaggaggaggatccgggatagtaggcattgtggctggcttggcggtgctcgcggtggtagtaatcggggctgttgtcgcaaccgtgatgtgtcgcagaaaatcctcaggtggcaagggtggcagctactctcaagctgctagcagcgattctgcccaagggagcgacgttagtcttacggcgtagtaa

SEQ ID NO: 17371 - DNA, 1764 bp, synthetic construct
  misc_feature 1..1764: note = Description of Artificial Sequence: Synthetic polynucleotide
  source 1..1764: mol_type = other DNA
atgagggtgatggcccccaggaccctcatattgttgttgagcggggcccttgcactcactgaaacttgggctgggagtgggggtagtggtgggggtggcagtggcgggtcaccggctcgaatggcaggtaacggcggggatgccgcattggcgctcttgctgctcgacaggttgaaccagttggaatccaagatgagtggaaaaggtcagcaacaacaggggcagaccgtaacgaagaagagcgctgccgaggcctccaagaagcctcgccagaaacgaacggccacgaaggcttataacgtgacccaggcattcggtagaagaggtcctgaacagacacaaggaaactttggcgaccaggaactcatcaggcaagggacggactacaagcattggccgcaaatagcgcagttcgcgcccagcgccagcgccttctttggaatgtcaagaattggaatggaagttacgccgagtgggacttggcttacttatacgggcgctattaagctcgacgacaaggaccccaatttcaaggaccaagtgatattgctcaataagcacatcgacgcctacaagactttccctcccacagagcccaaaaaggataagttccgagcctgcatggtaacgaacaatacttttacacttaaggtgccccatgtaggagagatacctgtggcttatcgaaaagtgctgcttaagactattcaacctcgcgtcgaaaaatacctctttgacgagagtggtgagtttaagctgtcagaagtaggacccgagcattcattggcggagtattacatattcttcgccagtttttattataaaaggtgcttccacacgactgacccgtcttttcttggtaggtacatgagtgcgctgtttgcagacgatctgaatcagctcaccggttatcacacggattttagttcagaaatcataggctaccagttgatgtgccaaccaattcttctcgccgaggcggaacttgctaaaaatgttagtttgattttgggcaccgtaagctggaaccttaaaaaacgataccttctctctgccggcatatttggtgctattactgacgtgttctataaagagaattcatataaagttccaactgacaactatatcaccacctatgctaggatggcggcaccgaaggaaataatctttctggagggggaaactctgtttggtgatgataccgtaattgaggttgccataatactggcatcattctcagccagcactagaagacgcgggaagcttttggaacagtggaatttggttattggattcaaccgaaacaggtttttgtatataattaagctcatatttctttggttgttgtggcccgttacccttgcatgcttcgttcttgccgccgtctacagtgagctcgtaattggggcggttattctgcgaggacatctccgaatcgctggtcaccatctcggacgcacagtcgctacaagtaggacgctttcatactataaattgggagccagtcaacgagttaaacggtactcagggttgatgtggttgagctatttcgcaaggtacgccggaggatccctgggagggggaggcagcggtatagtcggtatcgtggcaggccttgcggtgctcgcggttgtagtcataggcgcagtggttgctacagtcatgtgtcgccgcaaatccagtggaggtaaggggggtagctattcccaggccgcttcatctgactcagcacaaggatcagacgtctctctgactgcataataa

SEQ ID NO: 17372 - protein, 4 aa, synthetic construct
  REGION 1..4: note = Description of Artificial Sequence: Synthetic peptide
YHFF

SEQ ID NO: 17373 - protein, 15 aa, synthetic construct
  REGION 1..15: note = Description of Artificial Sequence: Synthetic peptide
HTTDPSFLGRYMSAL

SEQ ID NO: 17374 - protein, 4 aa, synthetic construct
  REGION 1..4: note = Description of Artificial Sequence: Synthetic peptide
KRRY

SEQ ID NO: 17375 - protein, 13 aa, synthetic construct
  REGION 1..13: note = Description of Artificial Sequence: Synthetic peptide
APKEIIFLEGETL

SEQ ID NO: 17376 - protein, 11 aa, synthetic construct
  REGION 1..11: note = Description of Artificial Sequence: Synthetic peptide
AIILASFSAST

SEQ ID NO: 17377 - protein, 4 aa, synthetic construct
  REGION 1..4: note = Description of Artificial Sequence: Synthetic peptide
RRMA

SEQ ID NO: 17378 - protein, 16 aa, synthetic construct
  REGION 1..16: note = Description of Artificial Sequence: Synthetic peptide
VPHVGEIPVAYRKVLL

SEQ ID NO: 17379 - protein, 8 aa, synthetic construct
  REGION 1..8: note = Description of Artificial Sequence: Synthetic peptide
VEKGIYQT

SEQ ID NO: 17380 - protein, 418 aa, synthetic construct
  REGION 1..418: note = Description of Artificial Sequence: Synthetic polypeptide
SDNGPQNQRNAPRITFGGPSDSTGSNQNGERSGARSKQRRPQGLPNNTASWFTALTQHGKEDLKFPRGQGVPINTNSSPDDQIGYYRRATRRIRGGDGKMKDLSPRWYFYYLGTGPEAGLPYGANKDGIIWVATEGALNTPKDHIGTRNPANNAAIVLQLPQGTTLPKGFYAEGSRGGSQASSRSSSRSRNSSRNSTPGSSRGTSPARMAGNGGDAALALLLLDRLNQLESKMSGKGQQQQGQTVTKKSAAEASKKPRQKRTATKAYNVTQAFGRRGPEQTQGNFGDQELIRQGTDYKHWPQIAQFAPSASAFFGMSRIGMEVTPSGTWLTYTGAIKLDDKDPNFKDQVILLNKHIDAYKTFPPTEPKKDKKKKADETQALPQRQKKQQTVTLLPAADLDDFSKQLQQSMSSADSTQA

SEQ ID NO: 17381 - protein, 96 aa, synthetic construct
  REGION 1..96: note = Description of Artificial Sequence: Synthetic polypeptide
DPKISEMHPALRLVDPQIQLAVTRMENAVGRDQNNVGPKVYPIILRLGSPLSLNMARKTLNSLEDKAFQLTPIAVQMTKLATTEELPDEFVVVTVK

SEQ ID NO: 17382 - protein, 274 aa, synthetic construct
  REGION 1..274: note = Description of Artificial Sequence: Synthetic polypeptide
DLFMRIFTIGTVTLKQGEIKDATPSDFVRATATIPIQASLPFGWLIVGVALLAVFQSASKIITLKKRWQLALSKGVHFVCNLLLLFVTVYSHLLLVAAGLEAPFLYLYALVYFLQSINFVRIIMRLWLCWKCRSKNPLLYDANYFLCWHTNCYDYCIPYNSVTSSIVITSGDGTTSPISEHDYQIGGYTEKWESGVKDCVVLHSYFTSDYYQLYSTQLSTDTGVEHVTFFIYNKIVDEPEEHVQIHTIDGSSGVVNPVMEPIYDEPTTTTSVPL

SEQ ID NO: 17383 - protein, 24 aa, synthetic construct
  REGION 1..24: note = Description of Artificial Sequence: Synthetic peptide
GSGGSGEGRGSLLTCGDVEENPGP

SEQ ID NO: 17384 - protein, 25 aa, synthetic construct
  REGION 1..25: note = Description of Artificial Sequence: Synthetic peptide
GSGGSGATNFSLLKQAGDVEENPGP

SEQ ID NO: 17385 - protein, 25 aa, synthetic construct
  REGION 1..25: note = Description of Artificial Sequence: Synthetic peptide
GSGVKQTLNFDLLKLAGDVESNPGP

SEQ ID NO: 17386 - protein, 26 aa, synthetic construct
  REGION 1..26: note = Description of Artificial Sequence: Synthetic peptide
GSGGSGQCTNYALLKLAGDVESNPGP

SEQ ID NO: 17387 - protein, 4 aa, synthetic construct
  REGION 1..4: note = Description of Artificial Sequence: Synthetic peptide
FNSF

SEQ ID NO: 17388 - protein, 4 aa, synthetic construct
  REGION 1..4: note = Description of Artificial Sequence: Synthetic peptide
RRSY

SEQ ID NO: 17389 - protein, 4 aa, synthetic construct
  REGION 1..4: note = Description of Artificial Sequence: Synthetic peptide
LLVQ

SEQ ID NO: 17390 - DNA, 78 bp, synthetic construct
  misc_feature 1..78: note = Description of Artificial Sequence: Synthetic oligonucleotide
  source 1..78: mol_type = other DNA
atgagagtgatggcccccagaaccctgatcctgctgctgtctggcgccctggccctgacagagacatgggccggaagc

SEQ ID NO: 17391 - DNA, 30 bp, synthetic construct
  misc_feature 1..30: note = Description of Artificial Sequence: Synthetic oligonucleotide
  source 1..30: mol_type = other DNA
ggaggttccggaggaggcggcagtggcggc

SEQ ID NO: 17392 - DNA, 1254 bp, synthetic construct
  misc_feature 1..1254: note = Description of Artificial Sequence: Synthetic polynucleotide
  source 1..1254: mol_type = other DNA
tctgataatggaccccaaaatcagcgaaatgcaccccgcattacgtttggtggaccctcagattcaactggcagtaaccagaatggagaacgcagtggggcgcgatcaaaacaacgtcggccccaaggtttacccaataatactgcgtcttggttcaccgctctcactcaacatggcaaggaagaccttaaattccctcgaggacaaggcgttccaattaacaccaatagcagtccagatgaccaaattggctactaccgaagagctaccagacgaattcgtggtggtgacggtaaaatgaaagatctcagtccaagatggtatttctactacctaggaactgggccagaagctggacttccctatggtgctaacaaagacggcatcatatgggttgcaactgagggagccttgaatacaccaaaagatcacattggcacccgcaatcctgctaacaatgctgcaatcgtgctacaacttcctcaaggaacaacattgccaaaaggcttctacgcagaagggagcagaggcggcagtcaagcctcttctcgttcctcatcacgtagtcgcaacagttcaagaaattcaactccaggcagcagtaggggaacttctcctgctagaatggctggcaatggcggtgatgctgctcttgctttgctgctgcttgacagattgaaccagcttgagagcaaaatgtctggtaaaggccaacaacaacaaggccaaactgtcactaagaaatctgctgctgaggcttctaagaagcctcggcaaaaacgtactgccactaaagcatacaatgtaacacaagctttcggcagacgtggtccagaacaaacccaaggaaattttggggaccaggaactaatcagacaaggaactgattacaaacattggccgcaaattgcacaatttgcccccagcgcttcagcgttcttcggaatgtcgcgcattggcatggaagtcacaccttcgggaacgtggttgacctacacaggtgccatcaaattggatgacaaagatccaaatttcaaagatcaagtcattttgctgaataagcatattgacgcatacaaaacattcccaccaacagagcctaaaaaggacaaaaagaagaaggctgatgaaactcaagccttaccgcagagacagaagaaacagcaaactgtgactcttcttcctgctgcagatttggatgatttctccaaacaattgcaacaatccatgagcagtgctgactcaactcaggcc

SEQ ID NO: 17393 - DNA, 30 bp, synthetic construct
  misc_feature 1..30: note = Description of Artificial Sequence: Synthetic oligonucleotide
  source 1..30: mol_type = other DNA
ggaggttctgggggcggcggttcagggggc

SEQ ID NO: 17394 - DNA, 288 bp, synthetic construct
  misc_feature 1..288: note = Description of Artificial Sequence: Synthetic polynucleotide
  source 1..288: mol_type = other DNA
gaccccaaaatcagcgaaatgcaccccgcattacgtttggtggaccctcagattcaactggcagtaaccagaatggagaacgcagtggggcgcgatcaaaacaacgtcggccccaaggtttacccaataatactgcgtcttggttcaccgctctcactcaacatggcaaggaagaccttaaattccctcgaggacaaggcgttccaattaacaccaatagcagtccagatgaccaaattggctactaccgaagagctaccagacgaattcgtggtggtgacggtaaaa

SEQ ID NO: 17395 - DNA, 12 bp, synthetic construct
  misc_feature 1..12: note = Description of Artificial Sequence: Synthetic oligonucleotide
  source 1..12: mol_type = other DNA
taccatttcttt

SEQ ID NO: 17396 - DNA, 45 bp, synthetic construct
  misc_feature 1..45: note = Description of Artificial Sequence: Synthetic oligonucleotide
  source 1..45: mol_type = other DNA
cacacaactgatcctagttttctgggtaggtacatgtcagcatta

SEQ ID NO: 17397 - DNA, 33 bp, synthetic construct
  misc_feature 1..33: note = Description of Artificial Sequence: Synthetic oligonucleotide
  source 1..33: mol_type = other DNA
tttgctgatgatttaaaccagttaactggttat

SEQ ID NO: 17398 - DNA, 33 bp, synthetic construct
  misc_feature 1..33: note = Description of Artificial Sequence: Synthetic oligonucleotide
  source 1..33: mol_type = other DNA
catactgacttttcaagtgaaatcataggatac

SEQ ID NO: 17399 - DNA, 27 bp, synthetic construct
  misc_feature 1..27: note = Description of Artificial Sequence: Synthetic oligonucleotide
  source 1..27: mol_type = other DNA
cagcttatgtgtcaacctatactgtta

SEQ ID NO: 17400 - DNA, 33 bp, synthetic construct
  misc_feature 1..33: note = Description of Artificial Sequence: Synthetic oligonucleotide
  source 1..33: mol_type = other DNA
gcagaagctgaacttgcaaagaatgtgtcctta

SEQ ID NO: 17401 - DNA, 27 bp, synthetic construct
  misc_feature 1..27: note = Description of Artificial Sequence: Synthetic oligonucleotide
  source 1..27: mol_type = other DNA
attcttggaactgtttcttggaatttg

SEQ ID NO: 17402 - DNA, 12 bp, synthetic construct
  misc_feature 1..12: note = Description of Artificial Sequence: Synthetic oligonucleotide
  source 1..12: mol_type = other DNA
aagcgtcgctat

SEQ ID NO: 17403 - DNA, 27 bp, synthetic construct
  misc_feature 1..27: note = Description of Artificial Sequence: Synthetic oligonucleotide
  source 1..27: mol_type = other DNA
ttattatcagctggtatttttggtgct

SEQ ID NO: 17404 - DNA, 33 bp, synthetic construct
  misc_feature 1..33: note = Description of Artificial Sequence: Synthetic oligonucleotide
  source 1..33: mol_type = other DNA
attacggatgttttctacaaagaaaacagttac

SEQ ID NO: 17405 - DNA, 33 bp, synthetic construct
  misc_feature 1..33: note = Description of Artificial Sequence: Synthetic oligonucleotide
  source 1..33: mol_type = other DNA
aaagtgccaacagacaattatataaccacttac

SEQ ID NO: 17406 - DNA, 12 bp, synthetic construct
  misc_feature 1..12: note = Description of Artificial Sequence: Synthetic oligonucleotide
  source 1..12: mol_type = other DNA
gcgcggatggct

SEQ ID NO: 17407 - DNA, 39 bp, synthetic construct
  misc_feature 1..39: note = Description of Artificial Sequence: Synthetic oligonucleotide
  source 1..39: mol_type = other DNA
gccccaaaagaaattatcttcttagagggagaaacactt

SEQ ID NO: 17408 - DNA, 27 bp, synthetic construct
  misc_feature 1..27: note = Description of Artificial Sequence: Synthetic oligonucleotide
  source 1..27: mol_type = other DNA
tttggtgatgacactgtgatagaagtg

SEQ ID NO: 17409 - DNA, 33 bp, synthetic construct
  misc_feature 1..33: note = Description of Artificial Sequence: Synthetic oligonucleotide
  source 1..33: mol_type = other DNA
gccattattttggcatctttttctgcttccaca

SEQ ID NO: 17410 - DNA, 12 bp, synthetic construct
  misc_feature 1..12: note = Description of Artificial Sequence: Synthetic oligonucleotide
  source 1..12: mol_type = other DNA
cgccgtatggca

SEQ ID NO: 17411 - DNA, 30 bp, synthetic construct
  misc_feature 1..30: note = Description of Artificial Sequence: Synthetic oligonucleotide
  source 1..30: mol_type = other DNA
atggtaacaaacaataccttcacactcaaa

SEQ ID NO: 17412 - DNA, 48 bp, synthetic construct
  misc_feature 1..48: note = Description of Artificial Sequence: Synthetic oligonucleotide
  source 1..48: mol_type = other DNA
gtccctcatgtgggcgaaataccagtggcttaccgcaaggttcttctt

SEQ ID NO: 17413 - DNA, 27 bp, synthetic construct
  misc_feature 1..27: note = Description of Artificial Sequence: Synthetic oligonucleotide
  source 1..27: mol_type = other DNA
aagactattcaaccaagggttgaaaag

SEQ ID NO: 17414 - DNA, 33 bp, synthetic construct
  misc_feature 1..33: note = Description of Artificial Sequence: Synthetic oligonucleotide
  source 1..33: mol_type = other DNA
tacttatttgatgagtctggtgagtttaaattg

SEQ ID NO: 17415 - DNA, 36 bp, synthetic construct
  misc_feature 1..36: note = Description of Artificial Sequence: Synthetic oligonucleotide
  source 1..36: mol_type = other DNA
tcagaagtaggacctgagcatagtcttgccgaatac

SEQ ID NO: 17416 - DNA, 27 bp, synthetic construct
  misc_feature 1..27: note = Description of Artificial Sequence: Synthetic oligonucleotide
  source 1..27: mol_type = other DNA
tacatcttctttgcatcattttattat

SEQ ID NO: 17417 - DNA, 12 bp, synthetic construct
  misc_feature 1..12: note = Description of Artificial Sequence: Synthetic oligonucleotide
  source 1..12: mol_type = other DNA
aaacgtaacggg

SEQ ID NO: 17418 - DNA, 822 bp, synthetic construct
  misc_feature 1..822: note = Description of Artificial Sequence: Synthetic polynucleotide
  source 1..822: mol_type = other DNA
gatttgtttatgagaatcttcacaattggaactgtaactttgaagcaaggtgaaatcaaggatgctactccttcagattttgttcgcgctactgcaacgataccgatacaagcctcactccctttcggatggcttattgttggcgttgcacttcttgctgtttttcagagcgcttccaaaatcataaccctcaaaaagagatggcaactagcactctccaagggtgttcactttgtttgcaacttgctgttgttgtttgtaacagtttactcacaccttttgctcgttgctgctggccttgaagccccttttctctatctttatgctttagtctacttcttgcagagtataaactttgtaagaataataatgaggctttggctttgctggaaatgccgttccaaaaacccattactttatgatgccaactattttctttgctggcatactaattgttacgactattgtataccttacaatagtgtaacttcttcaattgtcattacttcaggtgatggcacaacaagtcctatttctgaacatgactaccagattggtggttatactgaaaaatgggaatctggagtaaaagactgtgttgtattacacagttacttcacttcagactattaccagctgtactcaactcaattgagtacagacactggtgttgaacatgttaccttcttcatctacaataaaattgttgatgagcctgaagaacatgtccaaattcacacaatcgacggttcatccggagttgttaatccagtaatggaaccaatttatgatgaaccgacgacgactactagcgtgcctttg

SEQ ID NO: 17419 - DNA, 663 bp, synthetic construct
  misc_feature 1..663: note = Description of Artificial Sequence: Synthetic polynucleotide
  source 1..663: mol_type = other DNA
gcagattccaacggtactattaccgttgaagagcttaaaaagctccttgaacaatggaacctagtaataggtttcctattccttacatggatttgtcttctacaatttgcctatgccaacaggaataggtttttgtatataattaagttaattttcctctggctgttatggccagtaactttagcttgttttgtgcttgctgctgtttacagaataaattggatcaccggtggaattgctatcgcaatggcttgtcttgtaggcttgatgtggctcagctacttcattgcttctttcagactgtttgcgcgtacgcgttccatgtggtcattcaatccagaaactaacattcttctcaacgtgccactccatggcactattctgaccagaccgcttctagaaagtgaactcgtaatcggagctgtgatccttcgtggacatcttcgtattgctggacaccatctaggacgctgtgacatcaaggacctgcctaaagaaatcactgttgctacatcacgaacgctttcttattacaaattgggagcttcgcagcgtgtagcaggtgactcaggttttgctgcatacagtcgctacaggattggcaactataaattaaacacagaccattccagtagcagtgacaatattgctttgcttgtacag

SEQ ID NO: 17420 - DNA, 30 bp, synthetic construct
  misc_feature 1..30: note = Description of Artificial Sequence: Synthetic oligonucleotide
  source 1..30: mol_type = other DNA
ggtggttctcttggcggagggggttcggga

SEQ ID NO: 17421 - DNA, 171 bp, synthetic construct
  misc_feature 1..171: note = Description of Artificial Sequence: Synthetic polynucleotide
  source 1..171: mol_type = other DNA
atcgtgggaattgtggcaggactggcagtgctggccgtggtggtgatcggagccgtggtggctaccgtgatgtgcagacggaagtccagcggaggcaagggcggcagctacagccaggccgccagctctgatagcgcccagggcagcgacgtgtcactgacagcctagtaa

SEQ ID NO: 17422 - DNA, 72 bp, synthetic construct
  misc_feature 1..72: note = Description of Artificial Sequence: Synthetic oligonucleotide
  source 1..72: mol_type = other DNA
ggcagcggcggctccggcgagggcaggggaagtcttctaacatgcggggacgtggaggaaaatcccggccca

SEQ ID NO: 17423 - DNA, 75 bp, synthetic construct
  misc_feature 1..75: note = Description of Artificial Sequence: Synthetic oligonucleotide
  source 1..75: mol_type = other DNA
ggcagcggcggcagcggcgccacaaacttctctctgctaaagcaagcaggtgatgttgaagaaaaccccgggcct

SEQ ID NO: 17424 - DNA, 75 bp, synthetic construct
  misc_feature 1..75: note = Description of Artificial Sequence: Synthetic oligonucleotide
  source 1..75: mol_type = other DNA
ggcagcggcgtgaaacagactttgaattttgaccttctcaagttggcgggagacgtggagtccaaccctggacct

SEQ ID NO: 17425 - DNA, 78 bp, synthetic construct
  misc_feature 1..78: note = Description of Artificial Sequence: Synthetic oligonucleotide
  source 1..78: mol_type = other DNA
ggcagcggcggctcgggccagtgtactaattatgctctcttgaaattggctggagatgttgagagcaacccaggtccc

SEQ ID NO: 17426 - DNA, 12 bp, synthetic construct
  misc_feature 1..12: note = Description of Artificial Sequence: Synthetic oligonucleotide
  source 1..12: mol_type = other DNA
ttcagggcttgc

SEQ ID NO: 17427 - DNA, 12 bp, synthetic construct
  misc_feature 1..12: note = Description of Artificial Sequence: Synthetic oligonucleotide
  source 1..12: mol_type = other DNA
aaaagaaatggc

SEQ ID NO: 17428 - DNA, 12 bp, synthetic construct
  misc_feature 1..12: note = Description of Artificial Sequence: Synthetic oligonucleotide
  source 1..12: mol_type = other DNA
ttcaactctttt

SEQ ID NO: 17429 - DNA, 12 bp, synthetic construct
  misc_feature 1..12: note = Description of Artificial Sequence: Synthetic oligonucleotide
  source 1..12: mol_type = other DNA
aaaaaacagggc

SEQ ID NO: 17430 - DNA, 12 bp, synthetic construct
  misc_feature 1..12: note = Description of Artificial Sequence: Synthetic oligonucleotide
  source 1..12: mol_type = other DNA
cgccggagttac

SEQ ID NO: 17431 - DNA, 12 bp, synthetic construct
  misc_feature 1..12: note = Description of Artificial Sequence: Synthetic oligonucleotide
  source 1..12: mol_type = other DNA
gcgcgaatggcg

SEQ ID NO: 17432 - DNA, 12 bp, synthetic construct
  misc_feature 1..12: note = Description of Artificial Sequence: Synthetic oligonucleotide
  source 1..12: mol_type = other DNA
ctgctggtccag

SEQ ID NO: 17433 - protein, 14 aa, synthetic construct
  REGION 1..14: note = Description of Artificial Sequence: Synthetic peptide
TTDPSFLGRYMSAL

SEQ ID NO: 17434 - protein, 4 aa, synthetic construct
  REGION 1..4: note = Description of Artificial Sequence: Synthetic peptide
SMFN

SEQ ID NO: 17435 - protein, 19 aa, synthetic construct
  REGION 1..19: note = Description of Artificial Sequence: Synthetic peptide
TVATSRTLSYYKLGASQRV

SEQ ID NO: 17436 - DNA, 954 bp, synthetic construct
  misc_feature 1..954: note = Description of Artificial Sequence: Synthetic polynucleotide
  source 1..954: mol_type = other DNA
aaagatctcagtccaagatggtatttctactacctaggaactgggccagaagctggacttccctatggtgctaacaaagacggcatcatatgggttgcaactgagggagccttgaatacaccaaaagatcacattggcacccgcaatcctgctaacaatgctgcaatcgtgctacaacttcctcaaggaacaacattgccaaaaggcttctacgcagaagggagcagaggcggcagtcaagcctcttctcgttcctcatcacgtagtcgcaacagttcaagaaattcaactccaggcagcagtaggggaacttctcctgctagaatggctggcaatggcggtgatgctgctcttgctttgctgctgcttgacagattgaaccagcttgagagcaaaatgtctggtaaaggccaacaacaacaaggccaaactgtcactaagaaatctgctgctgaggcttctaagaagcctcggcaaaaacgtactgccactaaagcatacaatgtaacacaagctttcggcagacgtggtccagaacaaacccaaggaaattttggggaccaggaactaatcagacaaggaactgattacaaacattggccgcaaattgcacaatttgcccccagcgcttcagcgttcttcggaatgtcgcgcattggcatggaagtcacaccttcgggaacgtggttgacctacacaggtgccatcaaattggatgacaaagatccaaatttcaaagatcaagtcattttgctgaataagcatattgacgcatacaaaacattcccaccaacagagcctaaaaaggacaaaaagaagaaggctgatgaaactcaagccttaccgcagagacagaagaaacagcaaactgtgactcttcttcctgctgcagatttggatgatttctccaaacaattgcaacaatccatgagcagtgctgactcaactcaggcc

SEQ ID NO: 17437 - DNA, 12 bp, synthetic construct
  misc_feature 1..12: note = Description of Artificial Sequence: Synthetic oligonucleotide
  source 1..12: mol_type = other DNA
ttccgcgcgtgc

SEQ ID NO: 17438 - DNA, 12 bp, synthetic construct
  misc_feature 1..12: note = Description of Artificial Sequence: Synthetic oligonucleotide
  source 1..12: mol_type = other DNA
aaaagatgtttt

SEQ ID NO: 17439 - DNA, 12 bp, synthetic construct
  misc_feature 1..12: note = Description of Artificial Sequence: Synthetic oligonucleotide
  source 1..12: mol_type = other DNA
aaaaagcgttat

SEQ ID NO: 17440 - DNA, 12 bp, synthetic construct
  misc_feature 1..12: note = Description of Artificial Sequence: Synthetic oligonucleotide
  source 1..12: mol_type = other DNA
gcccgaatggct

SEQ ID NO: 17441 - DNA, 12 bp, synthetic construct
  misc_feature 1..12: note = Description of Artificial Sequence: Synthetic oligonucleotide
  source 1..12: mol_type = other DNA
aggaggtctgga

SEQ ID NO: 17442 - DNA, 99 bp, synthetic construct
  misc_feature 1..99: note = Description of Artificial Sequence: Synthetic oligonucleotide
  source 1..99: mol_type = other DNA
agaatggctggcaatggcggtgatgctgctcttgctttgctgctgcttgacagattgaaccagcttgagagcaaaatgtctggtaaaggccaacaacaa

SEQ ID NO: 17443 - DNA, 12 bp, synthetic construct
  misc_feature 1..12: note = Description of Artificial Sequence: Synthetic oligonucleotide
  source 1..12: mol_type = other DNA
atgagagcgtgc

SEQ ID NO: 17444 - DNA, 12 bp, synthetic construct
  misc_feature 1..12: note = Description of Artificial Sequence: Synthetic oligonucleotide
  source 1..12: mol_type = other DNA
aaaatgtgcgga

SEQ ID NO: 17445 - DNA, 201 bp, synthetic construct
  misc_feature 1..201: note = Description of Artificial Sequence: Synthetic polynucleotide
  source 1..201: mol_type = other DNA
tacaaacattggccgcaaattgcacaatttgcccccagcgcttcagcgttcttcggaatgtcgcgcattggcatggaagtcacaccttcgggaacgtggttgacctacacaggtgccatcaaattggatgacaaagatccaaatttcaaagatcaagtcattttgctgaataagcatattgacgcatacaaaacattccca

SEQ ID NO: 17446 - DNA, 12 bp, synthetic construct
  misc_feature 1..12: note = Description of Artificial Sequence: Synthetic oligonucleotide
  source 1..12: mol_type = other DNA
gctcggtgtgca

SEQ ID NO: 17447 - DNA, 42 bp, synthetic construct
  misc_feature 1..42: note = Description of Artificial Sequence: Synthetic oligonucleotide
  source 1..42: mol_type = other DNA
acaactgatcctagttttctgggtaggtacatgtcagcatta

SEQ ID NO: 17448 - DNA, 12 bp, synthetic construct
  misc_feature 1..12: note = Description of Artificial Sequence: Synthetic oligonucleotide
  source 1..12: mol_type = other DNA
aaaaaacaaggt

SEQ ID NO: 17449 - DNA, 201 bp, synthetic construct
  misc_feature 1..201: note = Description of Artificial Sequence: Synthetic polynucleotide
  source 1..201: mol_type = other DNA
tttgcctatgccaacaggaataggtttttgtatataattaagttaattttcctctggctgttatggccagtaactttagcttgttttgtgcttgctgctgtttacagaataaattggatcaccggtggaattgctatcgcaatggcttgtcttgtaggcttgatgtggctcagctacttcattgcttctttcagactgttt

SEQ ID NO: 17450 - DNA, 12 bp, synthetic construct
  misc_feature 1..12: note = Description of Artificial Sequence: Synthetic oligonucleotide
  source 1..12: mol_type = other DNA
taccgctcctat

SEQ ID NO: 17451 - DNA, 12 bp, synthetic construct
  misc_feature 1..12: note = Description of Artificial Sequence: Synthetic oligonucleotide
  source 1..12: mol_type = other DNA
gctcggatggct

SEQ ID NO: 17452 - DNA, 12 bp, synthetic construct
  misc_feature 1..12: note = Description of Artificial Sequence: Synthetic oligonucleotide
  source 1..12: mol_type = other DNA
tctatgtttaac

SEQ ID NO: 17453 - DNA, 99 bp, synthetic construct
  misc_feature 1..99: note = Description of Artificial Sequence: Synthetic oligonucleotide
  source 1..99: mol_type = other DNA
ctaggacgctgtgacatcaaggacctgcctaaagaaatcactgttgctacatcacgaacgctttcttattacaaattgggagcttcgcagcgtgtagca

SEQ ID NO: 17454 - DNA, 501 bp, synthetic construct
  misc_feature 1..501: note = Description of Artificial Sequence: Synthetic polynucleotide
  source 1..501: mol_type = other DNA
tctcctgctagaatggctggcaatggcggtgatgctgctcttgctttgctgctgcttgacagattgaaccagcttgagagcaaaatgtctggtaaaggccaacaacaacaaggccaaactgtcactaagaaatctgctgctgaggcttctaagaagcctcggcaaaaacgtactgccactaaagcatacaatgtaacacaagctttcggcagacgtggtccagaacaaacccaaggaaattttggggaccaggaactaatcagacaaggaactgattacaaacattggccgcaaattgcacaatttgcccccagcgcttcagcgttcttcggaatgtcgcgcattggcatggaagtcacaccttcgggaacgtggttgacctacacaggtgccatcaaattggatgacaaagatccaaatttcaaagatcaagtcattttgctgaataagcatattgacgcatacaaaacattcccaccaacagagcctaaaaaggacaaa

SEQ ID NO: 17455 - DNA, 12 bp, synthetic construct
  misc_feature 1..12: note = Description of Artificial Sequence: Synthetic oligonucleotide
  source 1..12: mol_type = other DNA
ttcaaagccgca

SEQ ID NO: 17456 - DNA, 12 bp, synthetic construct
  misc_feature 1..12: note = Description of Artificial Sequence: Synthetic oligonucleotide
  source 1..12: mol_type = other DNA
aagaggaatggt

SEQ ID NO: 17457 - DNA, 12 bp, synthetic construct
  misc_feature 1..12: note = Description of Artificial Sequence: Synthetic oligonucleotide
  source 1..12: mol_type = other DNA
tacaattctttc

SEQ ID NO: 17458 - DNA, 12 bp, synthetic construct
  misc_feature 1..12: note = Description of Artificial Sequence: Synthetic oligonucleotide
  source 1..12: mol_type = other DNA
aagaaaaacgga

SEQ ID NO: 17459 - DNA, 12 bp, synthetic construct
  misc_feature 1..12: note = Description of Artificial Sequence: Synthetic oligonucleotide
  source 1..12: mol_type = other DNA
taccgatcctac

SEQ ID NO: 17460 - DNA, 12 bp, synthetic construct
  misc_feature 1..12: note = Description of Artificial Sequence: Synthetic oligonucleotide
  source 1..12: mol_type = other DNA
gctcggatggcg

SEQ ID NO: 17461 - DNA, 12 bp, synthetic construct
  misc_feature 1..12: note = Description of Artificial Sequence: Synthetic oligonucleotide
  source 1..12: mol_type = other DNA
aggcgacggggt

SEQ ID NO: 17462 - DNA, 12 bp, synthetic construct
  misc_feature 1..12: note = Description of Artificial Sequence: Synthetic oligonucleotide
  source 1..12: mol_type = other DNA
tttcgtgcgtgc

SEQ ID NO: 17463 - DNA, 12 bp, synthetic construct
  misc_feature 1..12: note = Description of Artificial Sequence: Synthetic oligonucleotide
  source 1..12: mol_type = other DNA
aagcgctgtttt

SEQ ID NO: 17464 - DNA, 12 bp, synthetic construct
  misc_feature 1..12: note = Description of Artificial Sequence: Synthetic oligonucleotide
  source 1..12: mol_type = other DNA
aaaaaacgttac

SEQ ID NO: 17465 - DNA, 12 bp, synthetic construct
  misc_feature 1..12: note = Description of Artificial Sequence: Synthetic oligonucleotide
  source 1..12: mol_type = other DNA
gcgcgaatggca

SEQ ID NO: 17466 - DNA, 12 bp, synthetic construct
  misc_feature 1..12: note = Description of Artificial Sequence: Synthetic oligonucleotide
  source 1..12: mol_type = other DNA
cgcaggcgcgga

SEQ ID NO: 17467 - DNA, 36 bp, synthetic construct
  misc_feature 1..36: note = Description of Artificial Sequence: Synthetic oligonucleotide
  source 1..36: mol_type = other DNA
aagctccttgaacaatggaacctagtaataggtttc

SEQ ID NO: 17468 - DNA, 93 bp, synthetic construct
  misc_feature 1..93: note = Description of Artificial Sequence: Synthetic oligonucleotide
  source 1..93: mol_type = other DNA
aacaggaataggtttttgtatataattaagttaattttcctctggctgttatggccagtaactttagcttgttttgtgcttgctgctgtttac

SEQ ID NO: 17469 - DNA, 69 bp, synthetic construct
  misc_feature 1..69: note = Description of Artificial Sequence: Synthetic oligonucleotide
  source 1..69: mol_type = other DNA
agtgaactcgtaatcggagctgtgatccttcgtggacatcttcgtattgctggacaccatctaggacgc

SEQ ID NO: 17470 - DNA, 57 bp, synthetic construct
  misc_feature 1..57: note = Description of Artificial Sequence: Synthetic oligonucleotide
  source 1..57: mol_type = other DNA
actgttgctacatcacgaacgctttcttattacaaattgggagcttcgcagcgtgta

SEQ ID NO: 17471 - DNA, 12 bp, synthetic construct
  misc_feature 1..12: note = Description of Artificial Sequence: Synthetic oligonucleotide
  source 1..12: mol_type = other DNA
aaacgctacagt

SEQ ID NO: 17472 - DNA, 24 bp, synthetic construct
  misc_feature 1..24: note = Description of Artificial Sequence: Synthetic oligonucleotide
  source 1..24: mol_type = other DNA
ggcttgatgtggctcagctacttc

SEQ ID NO: 17473 - DNA, 12 bp, synthetic construct
  misc_feature 1..12: note = Description of Artificial Sequence: Synthetic oligonucleotide
  source 1..12: mol_type = other DNA
gcgcgttatgcc

SEQ ID NO: 17474 - protein, 1367 aa, synthetic construct
  REGION 1..1367: note = Description of Artificial Sequence: Synthetic polypeptide
MRVMAPRTLILLLSGALALTETWAGSGGSGGGGSGGSDNGPQNQRNAPRITFGGPSDSTGSNQNGERSGARSKQRRPQGLPNNTASWFTALTQHGKEDLKFPRGQGVPINTNSSPDDQIGYYRRATRRIRGGDGKMKDLSPRWYFYYLGTGPEAGLPYGANKDGIIWVATEGALNTPKDHIGTRNPANNAAIVLQLPQGTTLPKGFYAEGSRGGSQASSRSSSRSRNSSRNSTPGSSRGTSPARMAGNGGDAALALLLLDRLNQLESKMSGKGQQQQGQTVTKKSAAEASKKPRQKRTATKAYNVTQAFGRRGPEQTQGNFGDQELIRQGTDYKHWPQIAQFAPSASAFFGMSRIGMEVTPSGTWLTYTGAIKLDDKDPNFKDQVILLNKHIDAYKTFPPTEPKKDKKKKADETQALPQRQKKQQTVTLLPAADLDDFSKQLQQSMSSADSTQAGGSGGGGSGGDPKISEMHPALRLVDPQIQLAVTRMENAVGRDQNNVGPKVYPIILRLGSPLSLNMARKTLNSLEDKAFQLTPIAVQMTKLATTEELPDEFVVVTVKGGSGGGGSGGYHFFHTTDPSFLGRYMSALFADDLNQLTGYHTDFSSEIIGYQLMCQPILLAEAELAKNVSLILGTVSWNLKRRYLLSAGIFGAITDVFYKENSYKVPTDNYITTYARMAAPKEIIFLEGETLFGDDTVIEVAIILASFSASTRRMAMVTNNTFTLKVPHVGEIPVAYRKVLLKTIQPRVEKYLFDESGEFKLSEVGPEHSLAEYYIFFASFYYKRNGGGSGGGGSGGDLFMRIFTIGTVTLKQGEIKDATPSDFVRATATIPIQASLPFGWLIVGVALLAVFQSASKIITLKKRWQLALSKGVHFVCNLLLLFVTVYSHLLLVAAGLEAPFLYLYALVYFLQSINFVRIIMRLWLCWKCRSKNPLLYDANYFLCWHTNCYDYCIPYNSVTSSIVITSGDGTTSPISEHDYQIGGYTEKWESGVKDCVVLHSYFTSDYYQLYSTQLSTDTGVEHVTFFIYNKIVDEPEEHVQIHTIDGSSGVVNPVMEPIYDEPTTTTSVPLGGSGGGGSGGADSNGTITVEELKKLLEQWNLVIGFLFLTWICLLQFAYANRNRFLYIIKLIFLWLLWPVTLACFVLAAVYRINWITGGIAIAMACLVGLMWLSYFIASFRLFARTRSMWSFNPETNILLNVPLHGTILTRPLLESELVIGAVILRGHLRIAGHHLGRCDIKDLPKEITVATSRTLSYYKLGASQRVAGDSGFAAYSRYRIGNYKLNTDHSSSSDNIALLVQGGSLGGGGSGIVGIVAGLAVLAVVVIGAVVATVMCRRKSSGGKGGSYSQAASSDSAQGSDVSLTA

SEQ ID NO: 17475 - protein, 1367 aa, synthetic construct
  REGION 1..1367: note = Description of Artificial Sequence: Synthetic polypeptide
MRVMAPRTLILLLSGALALTETWAGSGGSGGGGSGGADSNGTITVEELKKLLEQWNLVIGFLFLTWICLLQFAYANRNRFLYIIKLIFLWLLWPVTLACFVLAAVYRINWITGGIAIAMACLVGLMWLSYFIASFRLFARTRSMWSFNPETNILLNVPLHGTILTRPLLESELVIGAVILRGHLRIAGHHLGRCDIKDLPKEITVATSRTLSYYKLGASQRVAGDSGFAAYSRYRIGNYKLNTDHSSSSDNIALLVQGGSGGGGSGGDLFMRIFTIGTVTLKQGEIKDATPSDFVRATATIPIQASLPFGWLIVGVALLAVFQSASKIITLKKRWQLALSKGVHFVCNLLLLFVTVYSHLLLVAAGLEAPFLYLYALVYFLQSINFVRIIMRLWLCWKCRSKNPLLYDANYFLCWHTNCYDYCIPYNSVTSSIVITSGDGTTSPISEHDYQIGGYTEKWESGVKDCVVLHSYFTSDYYQLYSTQLSTDTGVEHVTFFIYNKIVDEPEEHVQIHTIDGSSGVVNPVMEPIYDEPTTTTSVPLGGSGGGGSGGYHFFHTTDPSFLGRYMSALFADDLNQLTGYHTDFSSEIIGYQLMCQPILLAEAELAKNVSLILGTVSWNLKRRYLLSAGIFGAITDVFYKENSYKVPTDNYITTYARMAAPKEIIFLEGETLFGDDTVIEVAIILASFSASTRRMAMVTNNTFTLKVPHVGEIPVAYRKVLLKTIQPRVEKYLFDESGEFKLSEVGPEHSLAEYYIFFASFYYKRNGGGSGGGGSGGDPKISEMHPALRLVDPQIQLAVTRMENAVGRDQNNVGPKVYPIILRLGSPLSLNMARKTLNSLEDKAFQLTPIAVQMTKLATTEELPDEFVVVTVKGGSGGGGSGGSDNGPQNQRNAPRITFGGPSDSTGSNQNGERSGARSKQRRPQGLPNNTASWFTALTQHGKEDLKFPRGQGVPINTNSSPDDQIGYYRRATRRIRGGDGKMKDLSPRWYFYYLGTGPEAGLPYGANKDGIIWVATEGALNTPKDHIGTRNPANNAAIVLQLPQGTTLPKGFYAEGSRGGSQASSRSSSRSRNSSRNSTPGSSRGTSPARMAGNGGDAALALLLLDRLNQLESKMSGKGQQQQGQTVTKKSAAEASKKPRQKRTATKAYNVTQAFGRRGPEQTQGNFGDQELIRQGTDYKHWPQIAQFAPSASAFFGMSRIGMEVTPSGTWLTYTGAIKLDDKDPNFKDQVILLNKHIDAYKTFPPTEPKKDKKKKADETQALPQRQKKQQTVTLLPAADLDDFSKQLQQSMSSADSTQAGGSLGGGGSGIVGIVAGLAVLAVVVIGAVVATVMCRRKSSGGKGGSYSQAASSDSAQGSDVSLTA

SEQ ID NO: 17476 - protein, 1427 aa, synthetic construct
  REGION 1..1427: note = Description of Artificial Sequence: Synthetic polypeptide
MRVMAPRTLILLLSGALALTETWAGSGGSGGGGSGGSDNGPQNQRNAPRITFGGPSDSTGSNQNGERSGARSKQRRPQGLPNNTASWFTALTQHGKEDLKFPRGQGVPINTNSSPDDQIGYYRRATRRIRGGDGKMKDLSPRWYFYYLGTGPEAGLPYGANKDGIIWVATEGALNTPKDHIGTRNPANNAAIVLQLPQGTTLPKGFYAEGSRGGSQASSRSSSRSRNSSRNSTPGSSRGTSPARMAGNGGDAALALLLLDRLNQLESKMSGKGQQQQGQTVTKKSAAEASKKPRQKRTATKAYNVTQAFGRRGPEQTQGNFGDQELIRQGTDYKHWPQIAQFAPSASAFFGMSRIGMEVTPSGTWLTYTGAIKLDDKDPNFKDQVILLNKHIDAYKTFPPTEPKKDKKKKADETQALPQRQKKQQTVTLLPAADLDDFSKQLQQSMSSADSTQAGSGGSGEGRGSLLTCGDVEENPGPDPKISEMHPALRLVDPQIQLAVTRMENAVGRDQNNVGPKVYPIILRLGSPLSLNMARKTLNSLEDKAFQLTPIAVQMTKLATTEELPDEFVVVTVKGSGGSGATNFSLLKQAGDVEENPGPYHFFHTTDPSFLGRYMSALFADDLNQLTGYHTDFSSEIIGYQLMCQPILLAEAELAKNVSLILGTVSWNLKRRYLLSAGIFGAITDVFYKENSYKVPTDNYITTYARMAAPKEIIFLEGETLFGDDTVIEVAIILASFSASTRRMAMVTNNTFTLKVPHVGEIPVAYRKVLLKTIQPRVEKYLFDESGEFKLSEVGPEHSLAEYYIFFASFYYKRNGGSGVKQTLNFDLLKLAGDVESNPGPDLFMRIFTIGTVTLKQGEIKDATPSDFVRATATIPIQASLPFGWLIVGVALLAVFQSASKIITLKKRWQLALSKGVHFVCNLLLLFVTVYSHLLLVAAGLEAPFLYLYALVYFLQSINFVRIIMRLWLCWKCRSKNPLLYDANYFLCWHTNCYDYCIPYNSVTSSIVITSGDGTTSPISEHDYQIGGYTEKWESGVKDCVVLHSYFTSDYYQLYSTQLSTDTGVEHVTFFIYNKIVDEPEEHVQIHTIDGSSGVVNPVMEPIYDEPTTTTSVPLGSGGSGQCTNYALLKLAGDVESNPGPADSNGTITVEELKKLLEQWNLVIGFLFLTWICLLQFAYANRNRFLYIIKLIFLWLLWPVTLACFVLAAVYRINWITGGIAIAMACLVGLMWLSYFIASFRLFARTRSMWSFNPETNILLNVPLHGTILTRPLLESELVIGAVILRGHLRIAGHHLGRCDIKDLPKEITVATSRTLSYYKLGASQRVAGDSGFAAYSRYRIGNYKLNTDHSSSSDNIALLVQGGSLGGGGSGIVGIVAGLAVLAVVVIGAVVATVMCRRKSSGGKGGSYSQAASSDSAQGSDVSLTA

SEQ ID NO: 17477 - protein, 1335 aa, synthetic construct
  REGION 1..1335: note = Description of Artificial Sequence: Synthetic polypeptide
MRVMAPRTLILLLSGALALTETWAGSGGSGGGGSGGSDNGPQNQRNAPRITFGGPSDSTGSNQNGERSGARSKQRRPQGLPNNTASWFTALTQHGKEDLKFPRGQGVPINTNSSPDDQIGYYRRATRRIRGGDGKMKDLSPRWYFYYLGTGPEAGLPYGANKDGIIWVATEGALNTPKDHIGTRNPANNAAIVLQLPQGTTLPKGFYAEGSRGGSQASSRSSSRSRNSSRNSTPGSSRGTSPARMAGNGGDAALALLLLDRLNQLESKMSGKGQQQQGQTVTKKSAAEASKKPRQKRTATKAYNVTQAFGRRGPEQTQGNFGDQELIRQGTDYKHWPQIAQFAPSASAFFGMSRIGMEVTPSGTWLTYTGAIKLDDKDPNFKDQVILLNKHIDAYKTFPPTEPKKDKKKKADETQALPQRQKKQQTVTLLPAADLDDFSKQLQQSMSSADSTQAFRACMVTNNTFTLKVPHVGEIPVAYRKVLLKTIQPRVEKYLFDESGEFKLSEVGPEHSLAEYYIFFASFYYKRNGDPKISEMHPALRLVDPQIQLAVTRMENAVGRDQNNVGPKVYPIILRLGSPLSLNMARKTLNSLEDKAFQLTPIAVQMTKLATTEELPDEFVVVTVKFNSFHTTDPSFLGRYMSALFADDLNQLTGYHTDFSSEIIGYQLMCQPILLAEAELAKNVSLILGTVSWNLKKQGDLFMRIFTIGTVTLKQGEIKDATPSDFVRATATIPIQASLPFGWLIVGVALLAVFQSASKIITLKKRWQLALSKGVHFVCNLLLLFVTVYSHLLLVAAGLEAPFLYLYALVYFLQSINFVRIIMRLWLCWKCRSKNPLLYDANYFLCWHTNCYDYCIPYNSVTSSIVITSGDGTTSPISEHDYQIGGYTEKWESGVKDCVVLHSYFTSDYYQLYSTQLSTDTGVEHVTFFIYNKIVDEPEEHVQIHTIDGSSGVVNPVMEPIYDEPTTTTSVPLRRSYLLSAGIFGAITDVFYKENSYKVPTDNYITTYARMAAPKEIIFLEGETLFGDDTVIEVAIILASFSASTLLVQADSNGTITVEELKKLLEQWNLVIGFLFLTWICLLQFAYANRNRFLYIIKLIFLWLLWPVTLACFVLAAVYRINWITGGIAIAMACLVGLMWLSYFIASFRLFARTRSMWSFNPETNILLNVPLHGTILTRPLLESELVIGAVILRGHLRIAGHHLGRCDIKDLPKEITVATSRTLSYYKLGASQRVAGDSGFAAYSRYRIGNYKLNTDHSSSSDNIALLVQGGSLGGGGSGIVGIVAGLAVLAVVVIGAVVATVMCRRKSSGGKGGSYSQAASSDSAQGSDVSLTA

SEQ ID NO: 17478 - DNA, 4107 bp, synthetic construct
  misc_feature 1..4107: note = Description of Artificial Sequence: Synthetic polynucleotide
  source 1..4107: mol_type = other DNA
atgagagtgatggcccccagaaccctgatcctgctgctgtctggcgccctggccctgacagagacatgggccggaagcggcggatcgggggggggcggctcgggaggatctgataatggaccccaaaatcagcgaaatgcaccccgcattacgtttggtggaccctcagattcaactggcagtaaccagaatggagaacgcagtggggcgcgatcaaaacaacgtcggccccaaggtttacccaataatactgcgtcttggttcaccgctctcactcaacatggcaaggaagaccttaaattccctcgaggacaaggcgttccaattaacaccaatagcagtccagatgaccaaattggctactaccgaagagctaccagacgaattcgtggtggtgacggtaaaatgaaagatctcagtccaagatggtatttctactacctaggaactgggccagaagctggacttccctatggtgctaacaaagacggcatcatatgggttgcaactgagggagccttgaatacaccaaaagatcacattggcacccgcaatcctgctaacaatgctgcaatcgtgctacaacttcctcaaggaacaacattgccaaaaggcttctacgcagaagggagcagaggcggcagtcaagcctcttctcgttcctcatcacgtagtcgcaacagttcaagaaattcaactccaggcagcagtaggggaacttctcctgctagaatggctggcaatggcggtgatgctgctcttgctttgctgctgcttgacagattgaaccagcttgagagcaaaatgtctggtaaaggccaacaacaacaaggccaaactgtcactaagaaatctgctgctgaggcttctaagaagcctcggcaaaaacgtactgccactaaagcatacaatgtaacacaagctttcggcagacgtggtccagaacaaacccaaggaaattttggggaccaggaactaatcagacaaggaactgattacaaacattggccgcaaattgcacaatttgcccccagcgcttcagcgttcttcggaatgtcgcgcattggcatggaagtcacaccttcgggaacgtggttgacctacacaggtgccatcaaattggatgacaaagatccaaatttcaaagatcaagtcattttgctgaataagcatattgacgcatacaaaacattcccaccaacagagcctaaaaaggacaaaaagaagaaggctgatgaaactcaagccttaccgcagagacagaagaaacagcaaactgtgactcttcttcctgctgcagatttggatgatttctccaaacaattgcaacaatccatgagcagtgctgactcaactcaggccgggggaagtggaggagggggatctggaggggaccccaaaatcagcgaaatgcaccccgcattacgtttggtggaccctcagattcaactggcagtaaccagaatggagaacgcagtggggcgcgatcaaaacaacgtcggccccaaggtttacccaataatactgcgtcttggttcaccgctctcactcaacatggcaaggaagaccttaaattccctcgaggacaaggcgttccaattaacaccaatagcagtccagatgaccaaattggctactaccgaagagctaccagacgaattcgtggtggtgacggtaaaagggggaagtggaggagggggatctggagggtatcatttctttcacacaactgatcctagttttctgggtaggtacatgtcagcattatttgctgatgatttaaaccagttaactggttatcatactgacttttcaagtgaaatcataggataccagcttatgtgtcaacctatactgttagcagaagctgaacttgcaaagaatgtgtccttaattcttggaactgtttcttggaatttgaagcgccgttatttattatcagctggtatttttggtgctattacggatgttttctacaaagaaaacagttacaaagtgccaacagacaattatataaccacttacgcccgaatggcggccccaaaagaaattatcttcttagagggagaaacactttttggtgatgacactgtgatagaagtggccattattttggcatctttttctgcttccacacgaagaatggccatggtaacaaacaataccttcacactcaaagtccctcatgtgggcgaaataccagtggcttaccgcaaggttcttcttaagactattcaaccaagggttgaaaagtacttatttgatgagtctggtgagtttaaattgtcagaagtaggacctgagcatagtcttgccgaatactacatcttctttgcatcattttattataaacgtaatggtgggggaagtggaggagggggatctggaggggatttgtttatgagaatcttcacaattggaactgtaactttgaagcaaggtgaaatcaaggatgctactccttcagattttgttcgcgctactgcaacgataccgatacaagcctcactccctttcggatggcttattgttggcgttgcacttcttgctgtttttcagagcgcttccaaaatcataaccctcaaaaagagatggcaactagcactctccaagggtgttcactttgtttgcaacttgctgttgttgtttgtaacagtttactcacaccttttgctcgttgctgctggccttgaagccccttttctctatctttatgctttagtctacttcttgcagagtataaactttgtaagaataataatgaggctttggctttgctggaaatgccgttccaaaaacccattactttatgatgccaactattttctttgctggcatactaattgttacgactattgtataccttacaatagtgtaacttcttcaattgtcattacttcaggtgatggcacaacaagtcctatttctgaacatgactaccagattggtggttatactgaaaaatgggaatctggagtaaaagactgtgttgtattacacagttacttcacttcagactattaccagctgtactcaactcaattgagtacagacactggtgttgaacatgttaccttcttcatctacaataaaattgttgatgagcctgaagaacatgtccaaattcacacaatcgacggttcatccggagttgttaatccagtaatggaaccaatttatgatgaaccgacgacgactactagcgtgcctttggggggaagtggaggagggggatctggaggggcagattccaacggtactattaccgttgaagagcttaaaaagctccttgaacaatggaacctagtaataggtttcctattccttacatggatttgtcttctacaatttgcctatgccaacaggaataggtttttgtatataattaagttaattttcctctggctgttatggccagtaactttagcttgttttgtgcttgctgctgtttacagaataaattggatcaccggtggaattgctatcgcaatggcttgtcttgtaggcttgatgtggctcagctacttcattgcttctttcagactgtttgcgcgtacgcgttccatgtggtcattcaatccagaaactaacattcttctcaacgtgccactccatggcactattctgaccagaccgcttctagaaagtgaactcgtaatcggagctgtgatccttcgtggacatcttcgtattgctggacaccatctaggacgctgtgacatcaaggacctgcctaaagaaatcactgttgctacatcacgaacgctttcttattacaaattgggagcttcgcagcgtgtagcaggtgactcaggttttgctgcatacagtcgctacaggattggcaactataaattaaacacagaccattccagtagcagtgacaatattgctttgcttgtacagggagggagcctgggtgggggcggcagtgggatcgtgggaattgtggcaggactggcagtgctggccgtggtggtgatcggagccgtggtggctaccgtgatgtgcagacggaagtccagcggaggcaagggcggcagctacagccaggccgccagctctgatagcgcccagggcagcgacgtgtcactgacagcctagtaa

SEQ ID NO: 17479 - DNA, 4107 bp, synthetic construct
  misc_feature 1..4107: note = Description of Artificial Sequence: Synthetic polynucleotide
  source 1..4107: mol_type = other DNA
atgagagtgatggcccccagaaccctgatcctgctgctgtctggcgccctggccctgacagagacatgggccggaagcggcggatcgggggggggcggctcgggaggagcagattccaacggtactattaccgttgaagagcttaaaaagctccttgaacaatggaacctagtaataggtttcctattccttacatggatttgtcttctacaatttgcctatgccaacaggaataggtttttgtatataattaagttaattttcctctggctgttatggccagtaactttagcttgttttgtgcttgctgctgtttacagaataaattggatcaccggtggaattgctatcgcaatggcttgtcttgtaggcttgatgtggctcagctacttcattgcttctttcagactgtttgcgcgtacgcgttccatgtggtcattcaatccagaaactaacattcttctcaacgtgccactccatggcactattctgaccagaccgcttctagaaagtgaactcgtaatcggagctgtgatccttcgtggacatcttcgtattgctggacaccatctaggacgctgtgacatcaaggacctgcctaaagaaatcactgttgctacatcacgaacgctttcttattacaaattgggagcttcgcagcgtgtagcaggtgactcaggttttgctgcatacagtcgctacaggattggcaactataaattaaacacagaccattccagtagcagtgacaatattgctttgcttgtacaggggggaagtggaggagggggatctggaggggatttgtttatgagaatcttcacaattggaactgtaactttgaagcaaggtgaaatcaaggatgctactccttcagattttgttcgcgctactgcaacgataccgatacaagcctcactccctttcggatggcttattgttggcgttgcacttcttgctgtttttcagagcgcttccaaaatcataaccctcaaaaagagatggcaactagcactctccaagggtgttcactttgtttgcaacttgctgttgttgtttgtaacagtttactcacaccttttgctcgttgctgctggccttgaagccccttttctctatctttatgctttagtctacttcttgcagagtataaactttgtaagaataataatgaggctttggctttgctggaaatgccgttccaaaaacccattactttatgatgccaactattttctttgctggcatactaattgttacgactattgtataccttacaatagtgtaacttcttcaattgtcattacttcaggtgatggcacaacaagtcctatttctgaacatgactaccagattggtggttatactgaaaaatgggaatctggagtaaaagactgtgttgtattacacagttacttcacttcagactattaccagctgtactcaactcaattgagtacagacactggtgttgaacatgttaccttcttcatctacaataaaattgttgatgagcctgaagaacatgtccaaattcacacaatcgacggttcatccggagttgttaatccagtaatggaaccaatttatgatgaaccgacgacgactactagcgtgcctttggggggaagtggaggagggggatctggagggtatcatttctttcacacaactgatcctagttttctgggtaggtacatgtcagcattatttgctgatgatttaaaccagttaactggttatcatactgacttttcaagtgaaatcataggataccagcttatgtgtcaacctatactgttagcagaagctgaacttgcaaagaatgtgtccttaattcttggaactgtttcttggaatttgaagcgccgttatttattatcagctggtatttttggtgctattacggatgttttctacaaagaaaacagttacaaagtgccaacagacaattatataaccacttacgcccgaatggcggccccaaaagaaattatcttcttagagggagaaacactttttggtgatgacactgtgatagaagtggccattattttggcatctttttctgcttccacacgaagaatggccatggtaacaaacaataccttcacactcaaagtccctcatgtgggcgaaataccagtggcttaccgcaaggttcttcttaagactattcaaccaagggttgaaaagtacttatttgatgagtctggtgagtttaaattgtcagaagtaggacctgagcatagtcttgccgaatactacatcttctttgcatcattttattataaacgtaatggtgggggaagtggaggagggggatctggaggggaccccaaaatcagcgaaatgcaccccgcattacgtttggtggaccctcagattcaactggcagtaaccagaatggagaacgcagtggggcgcgatcaaaacaacgtcggccccaaggtttacccaataatactgcgtcttggttcaccgctctcactcaacatggcaaggaagaccttaaattccctcgaggacaaggcgttccaattaacaccaatagcagtccagatgaccaaattggctactaccgaagagctaccagacgaattcgtggtggtgacggtaaaagggggaagtggaggagggggatctggagggtctgataatggaccccaaaatcagcgaaatgcaccccgcattacgtttggtggaccctcagattcaactggcagtaaccagaatggagaacgcagtggggcgcgatcaaaacaacgtcggccccaaggtttacccaataatactgcgtcttggttcaccgctctcactcaacatggcaaggaagaccttaaattccctcgaggacaaggcgttccaattaacaccaatagcagtccagatgaccaaattggctactaccgaagagctaccagacgaattcgtggtggtgacggtaaaatgaaagatctcagtccaagatggtatttctactacctaggaactgggccagaagctggacttccctatggtgctaacaaagacggcatcatatgggttgcaactgagggagccttgaatacaccaaaagatcacattggcacccgcaatcctgctaacaatgctgcaatcgtgctacaacttcctcaaggaacaacattgccaaaaggcttctacgcagaagggagcagaggcggcagtcaagcctcttctcgttcctcatcacgtagtcgcaacagttcaagaaattcaactccaggcagcagtaggggaacttctcctgctagaatggctggcaatggcggtgatgctgctcttgctttgctgctgcttgacagattgaaccagcttgagagcaaaatgtctggtaaaggccaacaacaacaaggccaaactgtcactaagaaatctgctgctgaggcttctaagaagcctcggcaaaaacgtactgccactaaagcatacaatgtaacacaagctttcggcagacgtggtccagaacaaacccaaggaaattttggggaccaggaactaatcagacaaggaactgattacaaacattggccgcaaattgcacaatttgcccccagcgcttcagcgttcttcggaatgtcgcgcattggcatggaagtcacaccttcgggaacgtggttgacctacacaggtgccatcaaattggatgacaaagatccaaatttcaaagatcaagtcattttgctgaataagcatattgacgcatacaaaacattcccaccaacagagcctaaaaaggacaaaaagaagaaggctgatgaaactcaagccttaccgcagagacagaagaaacagcaaactgtgactcttcttcctgctgcagatttggatgatttctccaaacaattgcaacaatccatgagcagtgctgactcaactcaggccggagggagcctgggtgggggcggcagtgggatcgtgggaattgtggcaggactggcagtgctggccgtggtggtgatcggagccgtggtggctaccgtgatgtgcagacggaagtccagcggaggcaagggcggcagctacagccaggccgccagctctgatagcgcccagggcagcgacgtgtcactgacagcctagtaa

SEQ ID NO: 17480 - DNA, 4287 bp, synthetic construct
  misc_feature 1..4287: note = Description of Artificial Sequence: Synthetic polynucleotide
  source 1..4287: mol_type = other DNA
atgagagtgatggcccccagaaccctgatcctgctgctgtctggcgccctggccctgacagagacatgggccggaagcggcggatcgggggggggcggctcgggaggatctgataatggaccccaaaatcagcgaaatgcaccccgcattacgtttggtggaccctcagattcaactggcagtaaccagaatggagaacgcagtggggcgcgatcaaaacaacgtcggccccaaggtttacccaataatactgcgtcttggttcaccgctctcactcaacatggcaaggaagaccttaaattccctcgaggacaaggcgttccaattaacaccaatagcagtccagatgaccaaattggctactaccgaagagctaccagacgaattcgtggtggtgacggtaaaatgaaagatctcagtccaagatggtatttctactacctaggaactgggccagaagctggacttccctatggtgctaacaaagacggcatcatatgggttgcaactgagggagccttgaatacaccaaaagatcacattggcacccgcaatcctgctaacaatgctgcaatcgtgctacaacttcctcaaggaacaacattgccaaaaggcttctacgcagaagggagcagaggcggcagtcaagcctcttctcgttcctcatcacgtagtcgcaacagttcaagaaattcaactccaggcagcagtaggggaacttctcctgctagaatggctggcaatggcggtgatgctgctcttgctttgctgctgcttgacagattgaaccagcttgagagcaaaatgtctggtaaaggccaacaacaacaaggccaaactgtcactaagaaatctgctgctgaggcttctaagaagcctcggcaaaaacgtactgccactaaagcatacaatgtaacacaagctttcggcagacgtggtccagaacaaacccaaggaaattttggggaccaggaactaatcagacaaggaactgattacaaacattggccgcaaattgcacaatttgcccccagcgcttcagcgttcttcggaatgtcgcgcattggcatggaagtcacaccttcgggaacgtggttgacctacacaggtgccatcaaattggatgacaaagatccaaatttcaaagatcaagtcattttgctgaataagcatattgacgcatacaaaacattcccaccaacagagcctaaaaaggacaaaaagaagaaggctgatgaaactcaagccttaccgcagagacagaagaaacagcaaactgtgactcttcttcctgctgcagatttggatgatttctccaaacaattgcaacaatccatgagcagtgctgactcaactcaggccggcagcggcggctccggcgagggcaggggaagtcttctaacatgcggggacgtggaggaaaatcccggcccagaccccaaaatcagcgaaatgcaccccgcattacgtttggtggaccctcagattcaactggcagtaaccagaatggagaacgcagtggggcgcgatcaaaacaacgtcggccccaaggtttacccaataatactgcgtcttggttcaccgctctcactcaacatggcaaggaagaccttaaattccctcgaggacaaggcgttccaattaacaccaatagcagtccagatgaccaaattggctactaccgaagagctaccagacgaattcgtggtggtgacggtaaaaggcagcggcggcagcggcgccacaaacttctctctgctaaagcaagcaggtgatgttgaagaaaaccccgggccttatcatttctttcacacaactgatcctagttttctgggtaggtacatgtcagcattatttgctgatgatttaaaccagttaactggttatcatactgacttttcaagtgaaatcataggataccagcttatgtgtcaacctatactgttagcagaagctgaacttgcaaagaatgtgtccttaattcttggaactgtttcttggaatttgaagcgccgttatttattatcagctggtatttttggtgctattacggatgttttctacaaagaaaacagttacaaagtgccaacagacaattatataaccacttacgcccgaatggcggccccaaaagaaattatcttcttagagggagaaacactttttggtgatgacactgtgatagaagtggccattattttggcatctttttctgcttccacacgaagaatggccatggtaacaaacaataccttcacactcaaagtccctcatgtgggcgaaataccagtggcttaccgcaaggttcttcttaagactattcaaccaagggttgaaaagtacttatttgatgagtctggtgagtttaaattgtcagaagtaggacctgagcatagtcttgccgaatactacatcttctttgcatcattttattataaacgtaatggtggcagcggcgtgaaacagactttgaattttgaccttctcaagttggcgggagacgtggagtccaaccctggacctgatttgtttatgagaatcttcacaattggaactgtaactttgaagcaaggtgaaatcaaggatgctactccttcagattttgttcgcgctactgcaacgataccgatacaagcctcactccctttcggatggcttattgttggcgttgcacttcttgctgtttttcagagcgcttccaaaatcataaccctcaaaaagagatggcaactagcactctccaagggtgttcactttgtttgcaacttgctgttgttgtttgtaacagtttactcacaccttttgctcgttgctgctggccttgaagccccttttctctatctttatgctttagtctacttcttgcagagtataaactttgtaagaataataatgaggctttggctttgctggaaatgccgttccaaaaacccattactttatgatgccaactattttctttgctggcatactaattgttacgactattgtataccttacaatagtgtaacttcttcaattgtcattacttcaggtgatggcacaacaagtcctatttctgaacatgactaccagattggtggttatactgaaaaatgggaatctggagtaaaagactgtgttgtattacacagttacttcacttcagactattaccagctgtactcaactcaattgagtacagacactggtgttgaacatgttaccttcttcatctacaataaaattgttgatgagcctgaagaacatgtccaaattcacacaatcgacggttcatccggagttgttaatccagtaatggaaccaatttatgatgaaccgacgacgactactagcgtgcctttgggcagcggcggctcgggccagtgtactaattatgctctcttgaaattggctggagatgttgagagcaacccaggtcccgcagattccaacggtactattaccgttgaagagcttaaaaagctccttgaacaatggaacctagtaataggtttcctattccttacatggatttgtcttctacaatttgcctatgccaacaggaataggtttttgtatataattaagttaattttcctctggctgttatggccagtaactttagcttgttttgtgcttgctgctgtttacagaataaattggatcaccggtggaattgctatcgcaatggcttgtcttgtaggcttgatgtggctcagctacttcattgcttctttcagactgtttgcgcgtacgcgttccatgtggtcattcaatccagaaactaacattcttctcaacgtgccactccatggcactattctgaccagaccgcttctagaaagtgaactcgtaatcggagctgtgatccttcgtggacatcttcgtattgctggacaccatctaggacgctgtgacatcaaggacctgcctaaagaaatcactgttgctacatcacgaacgctttcttattacaaattgggagcttcgcagcgtgtagcaggtgactcaggttttgctgcatacagtcgctacaggattggcaactataaattaaacacagaccattccagtagcagtgacaatattgctttgcttgtacagggagggagcctgggtgggggcggcagtgggatcgtgggaattgtggcaggactggcagtgctggccgtggtggtgatcggagccgtggtggctaccgtgatgtgcagacggaagtccagcggaggcaagggcggcagctacagccaggccgccagctctgatagcgcccagggcagcgacgtgtcactgacagcctagtaa

SEQ ID NO: 17481 - DNA, 4011 bp, synthetic construct
  misc_feature 1..4011: note = Description of Artificial Sequence: Synthetic polynucleotide
  source 1..4011: mol_type = other DNA
atgagagtgatggcccccagaaccctgatcctgctgctgtctggcgccctggccctgacagagacatgggccggaagcggagggagtggtggcgggggatctggaggttctgataatggaccccaaaatcagcgaaatgcaccccgcattacgtttggtggaccctcagattcaactggcagtaaccagaatggagaacgcagtggggcgcgatcaaaacaacgtcggccccaaggtttacccaataatactgcgtcttggttcaccgctctcactcaacatggcaaggaagaccttaaattccctcgaggacaaggcgttccaattaacaccaatagcagtccagatgaccaaattggctactaccgaagagctaccagacgaattcgtggtggtgacggtaaaatgaaagatctcagtccaagatggtatttctactacctaggaactgggccagaagctggacttccctatggtgctaacaaagacggcatcatatgggttgcaactgagggagccttgaatacaccaaaagatcacattggcacccgcaatcctgctaacaatgctgcaatcgtgctacaacttcctcaaggaacaacattgccaaaaggcttctacgcagaagggagcagaggcggcagtcaagcctcttctcgttcctcatcacgtagtcgcaacagttcaagaaattcaactccaggcagcagtaggggaacttctcctgctagaatggctggcaatggcggtgatgctgctcttgctttgctgctgcttgacagattgaaccagcttgagagcaaaatgtctggtaaaggccaacaacaacaaggccaaactgtcactaagaaatctgctgctgaggcttctaagaagcctcggcaaaaacgtactgccactaaagcatacaatgtaacacaagctttcggcagacgtggtccagaacaaacccaaggaaattttggggaccaggaactaatcagacaaggaactgattacaaacattggccgcaaattgcacaatttgcccccagcgcttcagcgttcttcggaatgtcgcgcattggcatggaagtcacaccttcgggaacgtggttgacctacacaggtgccatcaaattggatgacaaagatccaaatttcaaagatcaagtcattttgctgaataagcatattgacgcatacaaaacattcccaccaacagagcctaaaaaggacaaaaagaagaaggctgatgaaactcaagccttaccgcagagacagaagaaacagcaaactgtgactcttcttcctgctgcagatttggatgatttctccaaacaattgcaacaatccatgagcagtgctgactcaactcaggcctttcgggcctgcatggtaacaaacaataccttcacactcaaagtccctcatgtgggcgaaataccagtggcttaccgcaaggttcttcttaagactattcaaccaagggttgaaaagtacttatttgatgagtctggtgagtttaaattgtcagaagtaggacctgagcatagtcttgccgaatactacatcttctttgcatcattttattataagcggaacggcgaccccaaaatcagcgaaatgcaccccgcattacgtttggtggaccctcagattcaactggcagtaaccagaatggagaacgcagtggggcgcgatcaaaacaacgtcggccccaaggtttacccaataatactgcgtcttggttcaccgctctcactcaacatggcaaggaagaccttaaattccctcgaggacaaggcgttccaattaacaccaatagcagtccagatgaccaaattggctactaccgaagagctaccagacgaattcgtggtggtgacggtaaaatttaactcttttcacacaactgatcctagttttctgggtaggtacatgtcagcattatttgctgatgatttaaaccagttaactggttatcatactgacttttcaagtgaaatcataggataccagcttatgtgtcaacctatactgttagcagaagctgaacttgcaaagaatgtgtccttaattcttggaactgtttcttggaatttgaaaaagcaaggagatttgtttatgagaatcttcacaattggaactgtaactttgaagcaaggtgaaatcaaggatgctactccttcagattttgttcgcgctactgcaacgataccgatacaagcctcactccctttcggatggcttattgttggcgttgcacttcttgctgtttttcagagcgcttccaaaatcataaccctcaaaaagagatggcaactagcactctccaagggtgttcactttgtttgcaacttgctgttgttgtttgtaacagtttactcacaccttttgctcgttgctgctggccttgaagccccttttctctatctttatgctttagtctacttcttgcagagtataaactttgtaagaataataatgaggctttggctttgctggaaatgccgttccaaaaacccattactttatgatgccaactattttctttgctggcatactaattgttacgactattgtataccttacaatagtgtaacttcttcaattgtcattacttcaggtgatggcacaacaagtcctatttctgaacatgactaccagattggtggttatactgaaaaatgggaatctggagtaaaagactgtgttgtattacacagttacttcacttcagactattaccagctgtactcaactcaattgagtacagacactggtgttgaacatgttaccttcttcatctacaataaaattgttgatgagcctgaagaacatgtccaaattcacacaatcgacggttcatccggagttgttaatccagtaatggaaccaatttatgatgaaccgacgacgactactagcgtgcctttgagacgttcttatttattatcagctggtatttttggtgctattacggatgttttctacaaagaaaacagttacaaagtgccaacagacaattatataaccacttacgctcgaatggctgccccaaaagaaattatcttcttagagggagaaacactttttggtgatgacactgtgatagaagtggccattattttggcatctttttctgcttccacactacttgtccaggcagattccaacggtactattaccgttgaagagcttaaaaagctccttgaacaatggaacctagtaataggtttcctattccttacatggatttgtcttctacaatttgcctatgccaacaggaataggtttttgtatataattaagttaattttcctctggctgttatggccagtaactttagcttgttttgtgcttgctgctgtttacagaataaattggatcaccggtggaattgctatcgcaatggcttgtcttgtaggcttgatgtggctcagctacttcattgcttctttcagactgtttgcgcgtacgcgttccatgtggtcattcaatccagaaactaacattcttctcaacgtgccactccatggcactattctgaccagaccgcttctagaaagtgaactcgtaatcggagctgtgatccttcgtggacatcttcgtattgctggacaccatctaggacgctgtgacatcaaggacctgcctaaagaaatcactgttgctacatcacgaacgctttcttattacaaattgggagcttcgcagcgtgtagcaggtgactcaggttttgctgcatacagtcgctacaggattggcaactataaattaaacacagaccattccagtagcagtgacaatattgctttgcttgtacagggtggctcgttaggtggcggagggtcaggcatcgtgggaattgtggcaggactggcagtgctggccgtggtggtgatcggagccgtggtggctaccgtgatgtgcagacggaagtccagcggaggcaagggcggcagctacagccaggccgccagctctgatagcgcccagggcagcgacgtgtcactgacagcctagtaa

SEQ ID NO: 17482 - protein, 857 aa, synthetic construct
  REGION 1..857: note = Description of Artificial Sequence: Synthetic polypeptide
MRVMAPRTLILLLSGALALTETWAGSGGSGGGGSGGKDLSPRWYFYYLGTGPEAGLPYGANKDGIIWVATEGALNTPKDHIGTRNPANNAAIVLQLPQGTTLPKGFYAEGSRGGSQASSRSSSRSRNSSRNSTPGSSRGTSPARMAGNGGDAALALLLLDRLNQLESKMSGKGQQQQGQTVTKKSAAEASKKPRQKRTATKAYNVTQAFGRRGPEQTQGNFGDQELIRQGTDYKHWPQIAQFAPSASAFFGMSRIGMEVTPSGTWLTYTGAIKLDDKDPNFKDQVILLNKHIDAYKTFPPTEPKKDKKKKADETQALPQRQKKQQTVTLLPAADLDDFSKQLQQSMSSADSTQAFRACMVTNNTFTLKVPHVGEIPVAYRKVLLKTIQPRVEKYLFDESGEFKLSEVGPEHSLAEYYIFFASFYYKRCFHTTDPSFLGRYMSALFADDLNQLTGYHTDFSSEIIGYQLMCQPILLAEAELAKNVSLILGTVSWNLKKRYLLSAGIFGAITDVFYKENSYKVPTDNYITTYARMAAPKEIIFLEGETLFGDDTVIEVAIILASFSASTRRSGADSNGTITVEELKKLLEQWNLVIGFLFLTWICLLQFAYANRNRFLYIIKLIFLWLLWPVTLACFVLAAVYRINWITGGIAIAMACLVGLMWLSYFIASFRLFARTRSMWSFNPETNILLNVPLHGTILTRPLLESELVIGAVILRGHLRIAGHHLGRCDIKDLPKEITVATSRTLSYYKLGASQRVAGDSGFAAYSRYRIGNYKLNTDHSSSSDNIALLVQGGSLGGGGSGIVGIVAGLAVLAVVVIGAVVATVMCRRKSSGGKGGSYSQAASSDSAQGSDVSLTA

SEQ ID NO: 17483 - protein, 505 aa, synthetic construct
  REGION 1..505: note = Description of Artificial Sequence: Synthetic polypeptide
MRVMAPRTLILLLSGALALTETWAGSGGSGGGGSGGRMAGNGGDAALALLLLDRLNQLESKMSGKGQQQMRACMVTNNTFTLKVPHVGEIPVAYRKVLLKTIQPRVEKYLFDESGEFKLSEVGPEHSLAEYKMCGYKHWPQIAQFAPSASAFFGMSRIGMEVTPSGTWLTYTGAIKLDDKDPNFKDQVILLNKHIDAYKTFPARCATTDPSFLGRYMSALFADDLNQLTGYHTDFSSEIIGYQLMCQPILLAEAELAKNVSLILGTVSWNLKKQGFAYANRNRFLYIIKLIFLWLLWPVTLACFVLAAVYRINWITGGIAIAMACLVGLMWLSYFIASFRLFYRSYLLSAGIFGAITDVFYKENSYKVPTDNYITTYARMAAPKEIIFLEGETLFGDDTVIEVSMFNLGRCDIKDLPKEITVATSRTLSYYKLGASQRVAGGSLGGGGSGIVGIVAGLAVLAVVVIGAVVATVMCRRKSSGGKGGSYSQAASSDSAQGSDVSLTA

SEQ ID NO: 17484 - protein, 593 aa, synthetic construct
  REGION 1..593: note = Description of Artificial Sequence: Synthetic polypeptide
MRVMAPRTLILLLSGALALTETWAGSGGSGGGGSGGSPARMAGNGGDAALALLLLDRLNQLESKMSGKGQQQQGQTVTKKSAAEASKKPRQKRTATKAYNVTQAFGRRGPEQTQGNFGDQELIRQGTDYKHWPQIAQFAPSASAFFGMSRIGMEVTPSGTWLTYTGAIKLDDKDPNFKDQVILLNKHIDAYKTFPPTEPKKDKFKAAMVTNNTFTLKVPHVGEIPVAYRKVLLKTIQPRVEKYLFDESGEFKLSEVGPEHSLAEYYIFFASFYYKRNGFAYANRNRFLYIIKLIFLWLLWPVTLACFVLAAVYRINWITGGIAIAMACLVGLMWLSYFIASFRLFYNSFHTTDPSFLGRYMSALFADDLNQLTGYHTDFSSEIIGYQLMCQPILLAEAELAKNVSLILGTVSWNLKKNGLGRCDIKDLPKEITVATSRTLSYYKLGASQRVAYRSYLLSAGIFGAITDVFYKENSYKVPTDNYITTYARMAAPKEIIFLEGETLFGDDTVIEVAIILASFSASTRRRGGGSLGGGGSGIVGIVAGLAVLAVVVIGAVVATVMCRRKSSGGKGGSYSQAASSDSAQGSDVSLTA

SEQ ID NO: 17485 - protein, 586 aa, synthetic construct
  REGION 1..586: note = Description of Artificial Sequence: Synthetic polypeptide
MRVMAPRTLILLLSGALALTETWAGSGGSGGGGSGGSPARMAGNGGDAALALLLLDRLNQLESKMSGKGQQQQGQTVTKKSAAEASKKPRQKRTATKAYNVTQAFGRRGPEQTQGNFGDQELIRQGTDYKHWPQIAQFAPSASAFFGMSRIGMEVTPSGTWLTYTGAIKLDDKDPNFKDQVILLNKHIDAYKTFPPTEPKKDKFRACMVTNNTFTLKVPHVGEIPVAYRKVLLKTIQPRVEKYLFDESGEFKLSEVGPEHSLAEYYIFFASFYYKRCFHTTDPSFLGRYMSALFADDLNQLTGYHTDFSSEIIGYQLMCQPILLAEAELAKNVSLILGTVSWNLKKRYLLSAGIFGAITDVFYKENSYKVPTDNYITTYARMAAPKEIIFLEGETLFGDDTVIEVAIILASFSASTRRRGKLLEQWNLVIGFNRNRFLYIIKLIFLWLLWPVTLACFVLAAVYSELVIGAVILRGHLRIAGHHLGRTVATSRTLSYYKLGASQRVKRYSGLMWLSYFARYAGGSLGGGGSGIVGIVAGLAVLAVVVIGAVVATVMCRRKSSGGKGGSYSQAASSDSAQGSDVSLTA

SEQ ID NO: 17486 - DNA, 2577 bp, synthetic construct
  misc_feature 1..2577: note = Description of Artificial Sequence: Synthetic polynucleotide
  source 1..2577: mol_type = other DNA
atgagagtgatggcccccagaaccctgatcctgctgctgtctggcgccctggccctgacagagacatgggccggaagcggaggttccggaggaggcggcagtggcggcaaagatctcagtccaagatggtatttctactacctaggaactgggccagaagctggacttccctatggtgctaacaaagacggcatcatatgggttgcaactgagggagccttgaatacaccaaaagatcacattggcacccgcaatcctgctaacaatgctgcaatcgtgctacaacttcctcaaggaacaacattgccaaaaggcttctacgcagaagggagcagaggcggcagtcaagcctcttctcgttcctcatcacgtagtcgcaacagttcaagaaattcaactccaggcagcagtaggggaacttctcctgctagaatggctggcaatggcggtgatgctgctcttgctttgctgctgcttgacagattgaaccagcttgagagcaaaatgtctggtaaaggccaacaacaacaaggccaaactgtcactaagaaatctgctgctgaggcttctaagaagcctcggcaaaaacgtactgccactaaagcatacaatgtaacacaagctttcggcagacgtggtccagaacaaacccaaggaaattttggggaccaggaactaatcagacaaggaactgattacaaacattggccgcaaattgcacaatttgcccccagcgcttcagcgttcttcggaatgtcgcgcattggcatggaagtcacaccttcgggaacgtggttgacctacacaggtgccatcaaattggatgacaaagatccaaatttcaaagatcaagtcattttgctgaataagcatattgacgcatacaaaacattcccaccaacagagcctaaaaaggacaaaaagaagaaggctgatgaaactcaagccttaccgcagagacagaagaaacagcaaactgtgactcttcttcctgctgcagatttggatgatttctccaaacaattgcaacaatccatgagcagtgctgactcaactcaggccttccgcgcgtgcatggtaacaaacaataccttcacactcaaagtccctcatgtgggcgaaataccagtggcttaccgcaaggttcttcttaagactattcaaccaagggttgaaaagtacttatttgatgagtctggtgagtttaaattgtcagaagtaggacctgagcatagtcttgccgaatactacatcttctttgcatcattttattataaaagatgttttcacacaactgatcctagttttctgggtaggtacatgtcagcattatttgctgatgatttaaaccagttaactggttatcatactgacttttcaagtgaaatcataggataccagcttatgtgtcaacctatactgttagcagaagctgaacttgcaaagaatgtgtccttaattcttggaactgtttcttggaatttgaaaaagcgttatttattatcagctggtatttttggtgctattacggatgttttctacaaagaaaacagttacaaagtgccaacagacaattatataaccacttacgcccgaatggctgccccaaaagaaattatcttcttagagggagaaacactttttggtgatgacactgtgatagaagtggccattattttggcatctttttctgcttccacaaggaggtctggagcagattccaacggtactattaccgttgaagagcttaaaaagctccttgaacaatggaacctagtaataggtttcctattccttacatggatttgtcttctacaatttgcctatgccaacaggaataggtttttgtatataattaagttaattttcctctggctgttatggccagtaactttagcttgttttgtgcttgctgctgtttacagaataaattggatcaccggtggaattgctatcgcaatggcttgtcttgtaggcttgatgtggctcagctacttcattgcttctttcagactgtttgcgcgtacgcgttccatgtggtcattcaatccagaaactaacattcttctcaacgtgccactccatggcactattctgaccagaccgcttctagaaagtgaactcgtaatcggagctgtgatccttcgtggacatcttcgtattgctggacaccatctaggacgctgtgacatcaaggacctgcctaaagaaatcactgttgctacatcacgaacgctttcttattacaaattgggagcttcgcagcgtgtagcaggtgactcaggttttgctgcatacagtcgctacaggattggcaactataaattaaacacagaccattccagtagcagtgacaatattgctttgcttgtacagggtggttctcttggcggagggggttcgggaatcgtgggaattgtggcaggactggcagtgctggccgtggtggtgatcggagccgtggtggctaccgtgatgtgcagacggaagtccagcggaggcaagggcggcagctacagccaggccgccagctctgatagcgcccagggcagcgacgtgtcactgacagcctagtaa

SEQ ID NO: 17487 - DNA, 1521 bp, synthetic construct
  misc_feature 1..1521: note = Description of Artificial Sequence: Synthetic polynucleotide
  source 1..1521: mol_type = other DNA
atgagagtgatggcccccagaaccctgatcctgctgctgtctggcgccctggccctgacagagacatgggccggaagcggaggttccggaggaggcggcagtggcggcagaatggctggcaatggcggtgatgctgctcttgctttgctgctgcttgacagattgaaccagcttgagagcaaaatgtctggtaaaggccaacaacaaatgagagcgtgcatggtaacaaacaataccttcacactcaaagtccctcatgtgggcgaaataccagtggcttaccgcaaggttcttcttaagactattcaaccaagggttgaaaagtacttatttgatgagtctggtgagtttaaattgtcagaagtaggacctgagcatagtcttgccgaatacaaaatgtgcggatacaaacattggccgcaaattgcacaatttgcccccagcgcttcagcgttcttcggaatgtcgcgcattggcatggaagtcacaccttcgggaacgtggttgacctacacaggtgccatcaaattggatgacaaagatccaaatttcaaagatcaagtcattttgctgaataagcatattgacgcatacaaaacattcccagctcggtgtgcaacaactgatcctagttttctgggtaggtacatgtcagcattatttgctgatgatttaaaccagttaactggttatcatactgacttttcaagtgaaatcataggataccagcttatgtgtcaacctatactgttagcagaagctgaacttgcaaagaatgtgtccttaattcttggaactgtttcttggaatttgaaaaaacaaggttttgcctatgccaacaggaataggtttttgtatataattaagttaattttcctctggctgttatggccagtaactttagcttgttttgtgcttgctgctgtttacagaataaattggatcaccggtggaattgctatcgcaatggcttgtcttgtaggcttgatgtggctcagctacttcattgcttctttcagactgttttaccgctcctatttattatcagctggtatttttggtgctattacggatgttttctacaaagaaaacagttacaaagtgccaacagacaattatataaccacttacgctcggatggctgccccaaaagaaattatcttcttagagggagaaacactttttggtgatgacactgtgatagaagtgtctatgtttaacctaggacgctgtgacatcaaggacctgcctaaagaaatcactgttgctacatcacgaacgctttcttattacaaattgggagcttcgcagcgtgtagcaggtggttctcttggcggagggggttcgggaatcgtgggaattgtggcaggactggcagtgctggccgtggtggtgatcggagccgtggtggctaccgtgatgtgcagacggaagtccagcggaggcaagggcggcagctacagccaggccgccagctctgatagcgcccagggcagcgacgtgtcactgacagcctagtaa

SEQ ID NO: 17488 - DNA, 1785 bp, synthetic construct
  misc_feature 1..1785: note = Description of Artificial Sequence: Synthetic polynucleotide
  source 1..1785: mol_type = other DNA
atgagagtgatggcccccagaaccctgatcctgctgctgtctggcgccctggccctgacagagacatgggccggaagcggaggttccggaggaggcggcagtggcggctctcctgctagaatggctggcaatggcggtgatgctgctcttgctttgctgctgcttgacagattgaaccagcttgagagcaaaatgtctggtaaaggccaacaacaacaaggccaaactgtcactaagaaatctgctgctgaggcttctaagaagcctcggcaaaaacgtactgccactaaagcatacaatgtaacacaagctttcggcagacgtggtccagaacaaacccaaggaaattttggggaccaggaactaatcagacaaggaactgattacaaacattggccgcaaattgcacaatttgcccccagcgcttcagcgttcttcggaatgtcgcgcattggcatggaagtcacaccttcgggaacgtggttgacctacacaggtgccatcaaattggatgacaaagatccaaatttcaaagatcaagtcattttgctgaataagcatattgacgcatacaaaacattcccaccaacagagcctaaaaaggacaaattcaaagccgcaatggtaacaaacaataccttcacactcaaagtccctcatgtgggcgaaataccagtggcttaccgcaaggttcttcttaagactattcaaccaagggttgaaaagtacttatttgatgagtctggtgagtttaaattgtcagaagtaggacctgagcatagtcttgccgaatactacatcttctttgcatcattttattataagaggaatggttttgcctatgccaacaggaataggtttttgtatataattaagttaattttcctctggctgttatggccagtaactttagcttgttttgtgcttgctgctgtttacagaataaattggatcaccggtggaattgctatcgcaatggcttgtcttgtaggcttgatgtggctcagctacttcattgcttctttcagactgttttacaattctttccacacaactgatcctagttttctgggtaggtacatgtcagcattatttgctgatgatttaaaccagttaactggttatcatactgacttttcaagtgaaatcataggataccagcttatgtgtcaacctatactgttagcagaagctgaacttgcaaagaatgtgtccttaattcttggaactgtttcttggaatttgaagaaaaacggactaggacgctgtgacatcaaggacctgcctaaagaaatcactgttgctacatcacgaacgctttcttattacaaattgggagcttcgcagcgtgtagcataccgatcctacttattatcagctggtatttttggtgctattacggatgttttctacaaagaaaacagttacaaagtgccaacagacaattatataaccacttacgctcggatggcggccccaaaagaaattatcttcttagagggagaaacactttttggtgatgacactgtgatagaagtggccattattttggcatctttttctgcttccacaaggcgacggggtggtggttctcttggcggagggggttcgggaatcgtgggaattgtggcaggactggcagtgctggccgtggtggtgatcggagccgtggtggctaccgtgatgtgcagacggaagtccagcggaggcaagggcggcagctacagccaggccgccagctctgatagcgcccagggcagcgacgtgtcactgacagcctagtaa

SEQ ID NO: 17489 - DNA, 1764 bp, synthetic construct
  misc_feature 1..1764: note = Description of Artificial Sequence: Synthetic polynucleotide
  source 1..1764: mol_type = other DNA
atgagagtgatggcccccagaaccctgatcctgctgctgtctggcgccctggccctgacagagacatgggccggaagcggaggttccggaggaggcggcagtggcggctctcctgctagaatggctggcaatggcggtgatgctgctcttgctttgctgctgcttgacagattgaaccagcttgagagcaaaatgtctggtaaaggccaacaacaacaaggccaaactgtcactaagaaatctgctgctgaggcttctaagaagcctcggcaaaaacgtactgccactaaagcatacaatgtaacacaagctttcggcagacgtggtccagaacaaacccaaggaaattttggggaccaggaactaatcagacaaggaactgattacaaacattggccgcaaattgcacaatttgcccccagcgcttcagcgttcttcggaatgtcgcgcattggcatggaagtcacaccttcgggaacgtggttgacctacacaggtgccatcaaattggatgacaaagatccaaatttcaaagatcaagtcattttgctgaataagcatattgacgcatacaaaacattcccaccaacagagcctaaaaaggacaaatttcgtgcgtgcatggtaacaaacaataccttcacactcaaagtccctcatgtgggcgaaataccagtggcttaccgcaaggttcttcttaagactattcaaccaagggttgaaaagtacttatttgatgagtctggtgagtttaaattgtcagaagtaggacctgagcatagtcttgccgaatactacatcttctttgcatcattttattataagcgctgttttcacacaactgatcctagttttctgggtaggtacatgtcagcattatttgctgatgatttaaaccagttaactggttatcatactgacttttcaagtgaaatcataggataccagcttatgtgtcaacctatactgttagcagaagctgaacttgcaaagaatgtgtccttaattcttggaactgtttcttggaatttgaaaaaacgttacttattatcagctggtatttttggtgctattacggatgttttctacaaagaaaacagttacaaagtgccaacagacaattatataaccacttacgcgcgaatggcagccccaaaagaaattatcttcttagagggagaaacactttttggtgatgacactgtgatagaagtggccattattttggcatctttttctgcttccacacgcaggcgcggaaagctccttgaacaatggaacctagtaataggtttcaacaggaataggtttttgtatataattaagttaattttcctctggctgttatggccagtaactttagcttgttttgtgcttgctgctgtttacagtgaactcgtaatcggagctgtgatccttcgtggacatcttcgtattgctggacaccatctaggacgcactgttgctacatcacgaacgctttcttattacaaattgggagcttcgcagcgtgtaaaacgctacagtggcttgatgtggctcagctacttcgcgcgttatgccggtggttctcttggcggagggggttcgggaatcgtgggaattgtggcaggactggcagtgctggccgtggtggtgatcggagccgtggtggctaccgtgatgtgcagacggaagtccagcggaggcaagggcggcagctacagccaggccgccagctctgatagcgcccagggcagcgacgtgtcactgacagcctagtaa

SEQ ID NO: 17490 - protein, 776 aa, synthetic construct
  REGION 1..776: note = Description of Artificial Sequence: Synthetic polypeptide
GGSGGGGSGGKDLSPRWYFYYLGTGPEAGLPYGANKDGIIWVATEGALNTPKDHIGTRNPANNAAIVLQLPQGTTLPKGFYAEGSRGGSQASSRSSSRSRNSSRNSTPGSSRGTSPARMAGNGGDAALALLLLDRLNQLESKMSGKGQQQQGQTVTKKSAAEASKKPRQKRTATKAYNVTQAFGRRGPEQTQGNFGDQELIRQGTDYKHWPQIAQFAPSASAFFGMSRIGMEVTPSGTWLTYTGAIKLDDKDPNFKDQVILLNKHIDAYKTFPPTEPKKDKKKKADETQALPQRQKKQQTVTLLPAADLDDFSKQLQQSMSSADSTQAFRACMVTNNTFTLKVPHVGEIPVAYRKVLLKTIQPRVEKYLFDESGEFKLSEVGPEHSLAEYYIFFASFYYKRCFHTTDPSFLGRYMSALFADDLNQLTGYHTDFSSEIIGYQLMCQPILLAEAELAKNVSLILGTVSWNLKKRYLLSAGIFGAITDVFYKENSYKVPTDNYITTYARMAAPKEIIFLEGETLFGDDTVIEVAIILASFSASTRRSGADSNGTITVEELKKLLEQWNLVIGFLFLTWICLLQFAYANRNRFLYIIKLIFLWLLWPVTLACFVLAAVYRINWITGGIAIAMACLVGLMWLSYFIASFRLFARTRSMWSFNPETNILLNVPLHGTILTRPLLESELVIGAVILRGHLRIAGHHLGRCDIKDLPKEITVATSRTLSYYKLGASQRVAGDSGFAAYSRYRIGNYKLNTDHSSSSDNIALLVQGGSGGGGSGG

SEQ ID NO: 17491 - protein, 862 aa, synthetic construct
  REGION 1..862: note = Description of Artificial Sequence: Synthetic polypeptide
MFVFLVLLPLVSSQCVNLTGGSGGGGSGGKDLSPRWYFYYLGTGPEAGLPYGANKDGIIWVATEGALNTPKDHIGTRNPANNAAIVLQLPQGTTLPKGFYAEGSRGGSQASSRSSSRSRNSSRNSTPGSSRGTSPARMAGNGGDAALALLLLDRLNQLESKMSGKGQQQQGQTVTKKSAAEASKKPRQKRTATKAYNVTQAFGRRGPEQTQGNFGDQELIRQGTDYKHWPQIAQFAPSASAFFGMSRIGMEVTPSGTWLTYTGAIKLDDKDPNFKDQVILLNKHIDAYKTFPPTEPKKDKKKKADETQALPQRQKKQQTVTLLPAADLDDFSKQLQQSMSSADSTQAFRACMVTNNTFTLKVPHVGEIPVAYRKVLLKTIQPRVEKYLFDESGEFKLSEVGPEHSLAEYYIFFASFYYKRCFHTTDPSFLGRYMSALFADDLNQLTGYHTDFSSEIIGYQLMCQPILLAEAELAKNVSLILGTVSWNLKKRYLLSAGIFGAITDVFYKENSYKVPTDNYITTYARMAAPKEIIFLEGETLFGDDTVIEVAIILASFSASTRRSGADSNGTITVEELKKLLEQWNLVIGFLFLTWICLLQFAYANRNRFLYIIKLIFLWLLWPVTLACFVLAAVYRINWITGGIAIAMACLVGLMWLSYFIASFRLFARTRSMWSFNPETNILLNVPLHGTILTRPLLESELVIGAVILRGHLRIAGHHLGRCDIKDLPKEITVATSRTLSYYKLGASQRVAGDSGFAAYSRYRIGNYKLNTDHSSSSDNIALLVQGGSGGGGSGGEQYIKWPWYIWLGFIAGLIAIVMVTIMLCCMTSCCSCLKGCCSCGSCCKFDEDDSEPVLKGVKLHYT

SEQ ID NO: 17492 - protein, 424 aa, synthetic construct
  REGION 1..424: note = Description of Artificial Sequence: Synthetic polypeptide
GGSGGGGSGGRMAGNGGDAALALLLLDRLNQLESKMSGKGQQQMRACMVTNNTFTLKVPHVGEIPVAYRKVLLKTIQPRVEKYLFDESGEFKLSEVGPEHSLAEYKMCGYKHWPQIAQFAPSASAFFGMSRIGMEVTPSGTWLTYTGAIKLDDKDPNFKDQVILLNKHIDAYKTFPARCATTDPSFLGRYMSALFADDLNQLTGYHTDFSSEIIGYQLMCQPILLAEAELAKNVSLILGTVSWNLKKQGFAYANRNRFLYIIKLIFLWLLWPVTLACFVLAAVYRINWITGGIAIAMACLVGLMWLSYFIASFRLFYRSYLLSAGIFGAITDVFYKENSYKVPTDNYITTYARMAAPKEIIFLEGETLFGDDTVIEVSMFNLGRCDIKDLPKEITVATSRTLSYYKLGASQRVAGGSGGGGSGG

SEQ ID NO: 17493 - protein, 510 aa, synthetic construct
  REGION 1..510: note = Description of Artificial Sequence: Synthetic polypeptide
MFVFLVLLPLVSSQCVNLTGGSGGGGSGGRMAGNGGDAALALLLLDRLNQLESKMSGKGQQQMRACMVTNNTFTLKVPHVGEIPVAYRKVLLKTIQPRVEKYLFDESGEFKLSEVGPEHSLAEYKMCGYKHWPQIAQFAPSASAFFGMSRIGMEVTPSGTWLTYTGAIKLDDKDPNFKDQVILLNKHIDAYKTFPARCATTDPSFLGRYMSALFADDLNQLTGYHTDFSSEIIGYQLMCQPILLAEAELAKNVSLILGTVSWNLKKQGFAYANRNRFLYIIKLIFLWLLWPVTLACFVLAAVYRINWITGGIAIAMACLVGLMWLSYFIASFRLFYRSYLLSAGIFGAITDVFYKENSYKVPTDNYITTYARMAAPKEIIFLEGETLFGDDTVIEVSMFNLGRCDIKDLPKEITVATSRTLSYYKLGASQRVAGGSGGGGSGGEQYIKWPWYIWLGFIAGLIAIVMVTIMLCCMTSCCSCLKGCCSCGSCCKFDEDDSEPVLKGVKLHYT

SEQ ID NO: 17494 - protein, 512 aa, synthetic construct
  REGION 1..512: note = Description of Artificial Sequence: Synthetic polypeptide
GGSGGGGSGGSPARMAGNGGDAALALLLLDRLNQLESKMSGKGQQQQGQTVTKKSAAEASKKPRQKRTATKAYNVTQAFGRRGPEQTQGNFGDQELIRQGTDYKHWPQIAQFAPSASAFFGMSRIGMEVTPSGTWLTYTGAIKLDDKDPNFKDQVILLNKHIDAYKTFPPTEPKKDKFKAAMVTNNTFTLKVPHVGEIPVAYRKVLLKTIQPRVEKYLFDESGEFKLSEVGPEHSLAEYYIFFASFYYKRNGFAYANRNRFLYIIKLIFLWLLWPVTLACFVLAAVYRINWITGGIAIAMACLVGLMWLSYFIASFRLFYNSFHTTDPSFLGRYMSALFADDLNQLTGYHTDFSSEIIGYQLMCQPILLAEAELAKNVSLILGTVSWNLKKNGLGRCDIKDLPKEITVATSRTLSYYKLGASQRVAYRSYLLSAGIFGAITDVFYKENSYKVPTDNYITTYARMAAPKEIIFLEGETLFGDDTVIEVAIILASFSASTRRRGGGSGGGGSGG

SEQ ID NO: 17495 - protein, 598 aa, synthetic construct
  REGION 1..598: note = Description of Artificial Sequence: Synthetic polypeptide
MFVFLVLLPLVSSQCVNLTGGSGGGGSGGSPARMAGNGGDAALALLLLDRLNQLESKMSGKGQQQQGQTVTKKSAAEASKKPRQKRTATKAYNVTQAFGRRGPEQTQGNFGDQELIRQGTDYKHWPQIAQFAPSASAFFGMSRIGMEVTPSGTWLTYTGAIKLDDKDPNFKDQVILLNKHIDAYKTFPPTEPKKDKFKAAMVTNNTFTLKVPHVGEIPVAYRKVLLKTIQPRVEKYLFDESGEFKLSEVGPEHSLAEYYIFFASFYYKRNGFAYANRNRFLYIIKLIFLWLLWPVTLACFVLAAVYRINWITGGIAIAMACLVGLMWLSYFIASFRLFYNSFHTTDPSFLGRYMSALFADDLNQLTGYHTDFSSEIIGYQLMCQPILLAEAELAKNVSLILGTVSWNLKKNGLGRCDIKDLPKEITVATSRTLSYYKLGASQRVAYRSYLLSAGIFGAITDVFYKENSYKVPTDNYITTYARMAAPKEIIFLEGETLFGDDTVIEVAIILASFSASTRRRGGGSGGGGSGGEQYIKWPWYIWLGFIAGLIAIVMVTIMLCCMTSCCSCLKGCCSCGSCCKFDEDDSEPVLKGVKLHYT

SEQ ID NO: 17496 - protein, 505 aa, synthetic construct
  REGION 1..505: note = Description of Artificial Sequence: Synthetic polypeptide
GGSGGGGSGGSPARMAGNGGDAALALLLLDRLNQLESKMSGKGQQQQGQTVTKKSAAEASKKPRQKRTATKAYNVTQAFGRRGPEQTQGNFGDQELIRQGTDYKHWPQIAQFAPSASAFFGMSRIGMEVTPSGTWLTYTGAIKLDDKDPNFKDQVILLNKHIDAYKTFPPTEPKKDKFRACMVTNNTFTLKVPHVGEIPVAYRKVLLKTIQPRVEKYLFDESGEFKLSEVGPEHSLAEYYIFFASFYYKRCFHTTDPSFLGRYMSALFADDLNQLTGYHTDFSSEIIGYQLMCQPILLAEAELAKNVSLILGTVSWNLKKRYLLSAGIFGAITDVFYKENSYKVPTDNYITTYARMAAPKEIIFLEGETLFGDDTVIEVAIILASFSASTRRRGKLLEQWNLVIGFNRNRFLYIIKLIFLWLLWPVTLACFVLAAVYSELVIGAVILRGHLRIAGHHLGRTVATSRTLSYYKLGASQRVKRYSGLMWLSYFARYAGGSGGGGSGG

SEQ ID NO: 17497 - protein, 591 aa, synthetic construct
  REGION 1..591: note = Description of Artificial Sequence: Synthetic polypeptide
MFVFLVLLPLVSSQCVNLTGGSGGGGSGGSPARMAGNGGDAALALLLLDRLNQLESKMSGKGQQQQGQTVTKKSAAEASKKPRQKRTATKAYNVTQAFGRRGPEQTQGNFGDQELIRQGTDYKHWPQIAQFAPSASAFFGMSRIGMEVTPSGTWLTYTGAIKLDDKDPNFKDQVILLNKHIDAYKTFPPTEPKKDKFRACMVTNNTFTLKVPHVGEIPVAYRKVLLKTIQPRVEKYLFDESGEFKLSEVGPEHSLAEYYIFFASFYYKRCFHTTDPSFLGRYMSALFADDLNQLTGYHTDFSSEIIGYQLMCQPILLAEAELAKNVSLILGTVSWNLKKRYLLSAGIFGAITDVFYKENSYKVPTDNYITTYARMAAPKEIIFLEGETLFGDDTVIEVAIILASFSASTRRRGKLLEQWNLVIGFNRNRFLYIIKLIFLWLLWPVTLACFVLAAVYSELVIGAVILRGHLRIAGHHLGRTVATSRTLSYYKLGASQRVKRYSGLMWLSYFARYAGGSGGGGSGGEQYIKWPWYIWLGFIAGLIAIVMVTIMLCCMTSCCSCLKGCCSCGSCCKFDEDDSEPVLKGVKLHYT

SEQ ID NO: 17498 - DNA, 57 bp, synthetic construct
  misc_feature 1..57: note = Description of Artificial Sequence: Synthetic oligonucleotide
  source 1..57: mol_type = other DNA
atgtttgtttttcttgttttacttcctttagtctcttctcagtgtgtcaatttgaca

SEQ ID NO: 17499 - DNA, 2328 bp, synthetic construct
  misc_feature 1..2328: note = Description of Artificial Sequence: Synthetic polynucleotide
  source 1..2328: mol_type = other DNA
ggcggctctggaggaggcggctccggaggcaaagatctgagcccaagatggtacttttactacctgggaacaggacctgaagctggactgccttatggagcaaataaagatggaatcatctgggtggcaacagaaggagcactgaatacaccaaaagatcacattggaaccagaaatccagcaaataatgcagcaatcgtgctgcagctgccacagggaacaacactgccaaaaggattttacgcagaaggaagcagaggaggaagccaggcaagcagcagaagcagcagcagaagcagaaatagcagcagaaatagcacacctggaagcagcagaggaacaagccctgcaagaatggcaggaaatggaggagatgcagcactggcactgctgctgctggatagactgaatcagctggaaagcaaaatgagcggaaaaggacagcagcagcagggacagacagtgacaaagaaaagcgctgctgaagcttccaagaaaccaagacagaaaagaacagcaacaaaagcatacaatgtgacacaggcatttggaaggagaggacctgaacagacccagggaaattttggagatcaggaactgatcagacagggaaccgattacaaacactggcctcagattgctcagtttgctccttctgcttctgctttctttggaatgtccagaattggaatggaagtgacaccttctggaacatggctgacatacacaggagcaatcaaactggatgataaagatccaaattttaaagatcaggtgattctgctgaataaacacattgatgcttacaaaacatttccaccaacagaaccaaagaaagataaaaagaagaaagctgatgaaacacaggctctgcctcagagacagaagaaacagcagacagtgacactgctgcctgctgctgatctggatgatttttccaaacagctgcagcagtccatgtcctccgctgattccacacaggcttttagagcttgcatggtgacaaacaacacatttacactgaaagtgcctcatgtgggagaaattcctgtggcttacagaaaagtgctgctgaaaacaattcaaccaagagtggaaaaatacctgtttgatgaatctggagaatttaaactttctgaagtgggacctgaacactctcttgctgaatactacattttctttgcttctttttactataaaagatgttttcacacaactgatccatcttttctgggaagatacatgtctgctctttttgctgatgatttaaatcagttaacaggatatcacacagatttttcttctgaaatcattggataccagttgatgtgtcaaccaattttgttggctgaagctgaattggcaaaaaacgtgtctttgattcttggaacagtttcttggaatcttaaaaagagatacttattatctgctggaatttttggagctatcacagatgtgttttacaaagaaaactcatacaaagtgccaacagacaattacataacaacatacgccagaatggctgctccaaaagaaatcatcttccttgaaggagaaacactttttggagatgatacagtgattgaagtggcaattattctggcatctttttctgcatccacaagaagatctggagctgattccaatggaacaattacagtggaagaactgaaaaagctgctggaacagtggaatctggtgattggatttctgtttctgacatggatttgtctgctgcagtttgcttacgctaatagaaatagatttctgtacattattaaactgatttttctgtggctgctgtggcctgtgacactggcttgctttgtgctggctgctgtgtacagaattaattggattacaggaggaattgcaattgcaatggcatgcctggtgggactgatgtggctgtcttactttattgcttcttttagactgtttgcaagaacaagatctatgtggtcttttaatcctgaaacaaatattctgctgaatgtgcctctgcacggaacaattctgacaagacctctgctggaatctgaactggtgattggagctgtgattctgagaggacacctgagaattgctggacaccacctgggaagatgcgatattaaagatctgccaaaagaaattacagtggcaacaagcagaacactgagctactacaaactgggagcttcccaaagagtggctggagatagcggatttgctgcttacagcagatacagaattggaaattacaaactgaataccgatcacagctcatcttctgataatattgctctgctggtgcagggaggatccggtggtggcggcagcggcggc

SEQ ID NO: 17500 - DNA, 207 bp, synthetic construct
  misc_feature 1..207: note = Description of Artificial Sequence: Synthetic polynucleotide
  source 1..207: mol_type = other DNA
gaacagtacattaaatggccttggtacatttggcttggatttattgcaggattaattgcaattgtgatggtgacaattatgttatgttgtatgacatcatgttgttcttgtttaaaaggatgttgttcttgtggaagctgttgtaaatttgatgaagatgattctgaacctgtgttaaaaggagtgaaattgcattacacatgatga

SEQ ID NO: 17501 - DNA, 11 bp, synthetic construct
  misc_feature 1..11: note = Description of Artificial Sequence: Synthetic oligonucleotide
  source 1..11: mol_type = other DNA
ctggagctagc

SEQ ID NO: 17502 - DNA, 3037 bp, synthetic construct
  misc_feature 1..3037: note = Description of Artificial Sequence: Synthetic polynucleotide
  source 1..3037: mol_type = other DNA
attcttctggtccccacagactcagagagaacccgccaccatgtttgtttttcttgttttacttcctttagtctcttctcagtgtgtcaatttgacaggcggctctggaggaggcggctccggaggcaaagatctgagcccaagatggtacttttactacctgggaacaggacctgaagctggactgccttatggagcaaataaagatggaatcatctgggtggcaacagaaggagcactgaatacaccaaaagatcacattggaaccagaaatccagcaaataatgcagcaatcgtgctgcagctgccacagggaacaacactgccaaaaggattttacgcagaaggaagcagaggaggaagccaggcaagcagcagaagcagcagcagaagcagaaatagcagcagaaatagcacacctggaagcagcagaggaacaagccctgcaagaatggcaggaaatggaggagatgcagcactggcactgctgctgctggatagactgaatcagctggaaagcaaaatgagcggaaaaggacagcagcagcagggacagacagtgacaaagaaaagcgctgctgaagcttccaagaaaccaagacagaaaagaacagcaacaaaagcatacaatgtgacacaggcatttggaaggagaggacctgaacagacccagggaaattttggagatcaggaactgatcagacagggaaccgattacaaacactggcctcagattgctcagtttgctccttctgcttctgctttctttggaatgtccagaattggaatggaagtgacaccttctggaacatggctgacatacacaggagcaatcaaactggatgataaagatccaaattttaaagatcaggtgattctgctgaataaacacattgatgcttacaaaacatttccaccaacagaaccaaagaaagataaaaagaagaaagctgatgaaacacaggctctgcctcagagacagaagaaacagcagacagtgacactgctgcctgctgctgatctggatgatttttccaaacagctgcagcagtccatgtcctccgctgattccacacaggcttttagagcttgcatggtgacaaacaacacatttacactgaaagtgcctcatgtgggagaaattcctgtggcttacagaaaagtgctgctgaaaacaattcaaccaagagtggaaaaatacctgtttgatgaatctggagaatttaaactttctgaagtgggacctgaacactctcttgctgaatactacattttctttgcttctttttactataaaagatgttttcacacaactgatccatcttttctgggaagatacatgtctgctctttttgctgatgatttaaatcagttaacaggatatcacacagatttttcttctgaaatcattggataccagttgatgtgtcaaccaattttgttggctgaagctgaattggcaaaaaacgtgtctttgattcttggaacagtttcttggaatcttaaaaagagatacttattatctgctggaatttttggagctatcacagatgtgttttacaaagaaaactcatacaaagtgccaacagacaattacataacaacatacgccagaatggctgctccaaaagaaatcatcttccttgaaggagaaacactttttggagatgatacagtgattgaagtggcaattattctggcatctttttctgcatccacaagaagatctggagctgattccaatggaacaattacagtggaagaactgaaaaagctgctggaacagtggaatctggtgattggatttctgtttctgacatggatttgtctgctgcagtttgcttacgctaatagaaatagatttctgtacattattaaactgatttttctgtggctgctgtggcctgtgacactggcttgctttgtgctggctgctgtgtacagaattaattggattacaggaggaattgcaattgcaatggcatgcctggtgggactgatgtggctgtcttactttattgcttcttttagactgtttgcaagaacaagatctatgtggtcttttaatcctgaaacaaatattctgctgaatgtgcctctgcacggaacaattctgacaagacctctgctggaatctgaactggtgattggagctgtgattctgagaggacacctgagaattgctggacaccacctgggaagatgcgatattaaagatctgccaaaagaaattacagtggcaacaagcagaacactgagctactacaaactgggagcttcccaaagagtggctggagatagcggatttgctgcttacagcagatacagaattggaaattacaaactgaataccgatcacagctcatcttctgataatattgctctgctggtgcagggaggatccggtggtggcggcagcggcggcgaacagtacattaaatggccttggtacatttggcttggatttattgcaggattaattgcaattgtgatggtgacaattatgttatgttgtatgacatcatgttgttcttgtttaaaaggatgttgttcttgtggaagctgttgtaaatttgatgaagatgattctgaacctgtgttaaaaggagtgaaattgcattacacatgatgactcgagctggtactgcatgcacgcaatgctagctgcccctttcccgtcctgggtaccccgagtctcccccgacctcgggtcccaggtatgctcccacctccacctgccccactcaccacctctgctagttccagacacctcccaagcacgcagcaatgcagctcaaaacgcttagcctagccacacccccacgggaaacagcagtgattaacctttagcaataaacgaaagtttaactaagctatactaaccccagggttggtcaatttcgtgccagccacaccctggagctagcaaaaaaaaaaaaaaaaaaaaaaaaaaaaaagcatatgactaaaaaaaaaaaaaaaaaaaaaaaaaaaaaaaaaaaaaaaaaaaaaaaaaaaaaaaaaaaaaaaaaaaaaa

SEQ ID NO: 17503 - DNA, 1272 bp, synthetic construct
  misc_feature 1..1272: note = Description of Artificial Sequence: Synthetic polynucleotide
  source 1..1272: mol_type = other DNA
ggcggctctggaggaggcggctccggaggcagaatggctggaaatggaggagatgctgctctggctctgctgctgctggatagactgaatcagctggaatcaaaaatgtctggaaaaggacagcaacagatgagagcttgcatggtgacaaacaacacatttacactgaaagtgcctcatgtgggagaaattcctgtggcttacagaaaagtgctgctgaaaacaattcaaccaagagtggaaaaatacctgtttgatgaatctggagaatttaaactttctgaagtgggacctgaacactctcttgctgaatacaaaatgtgcggatacaaacactggcctcagattgctcagtttgctccttctgcttctgctttctttggaatgagcagaattggaatggaagtgacaccttctggaacatggctgacatacacaggagcaatcaaactggatgataaagatccaaactttaaagatcaggtgattctgctgaacaaacacattgatgcttacaaaacatttcctgctagatgtgctacaactgatccttcttttctgggaagatacatgtctgctctttttgctgatgatttaaatcagttaacaggatatcacacagatttttcttctgaaatcattggataccagttgatgtgtcaaccaattttgttggctgaagctgaattggcaaaaaacgtgtctttgattcttggaacagtttcttggaatcttaaaaaacaaggatttgcatacgcaaatagaaatagatttctgtacattattaaactgatttttctgtggctgctgtggcctgtgacactggcttgctttgtgctggctgctgtgtacagaataaattggataacaggaggaattgcaattgcaatggcatgcttggtgggattgatgtggttgtcttactttattgcttcttttagactgttttacagatcctacttattatctgctggaatttttggagctatcacagatgtgttttacaaagaaaactcatacaaagtgccaacagacaattacataacaacatacgctagaatggctgctccaaaagaaatcatcttccttgaaggagaaacactttttggagatgatacagtgattgaagtgtccatgtttaatctgggaagatgcgatattaaagatctgccaaaagaaattacagtggcaacaagcagaacactgagctactacaaactgggagcaagccagagagtggcaggaggatccggtggtggcggcagcggcggc

SEQ ID NO: 17504 - DNA, 1981 bp, synthetic construct
  misc_feature 1..1981: note = Description of Artificial Sequence: Synthetic polynucleotide
  source 1..1981: mol_type = other DNA
attcttctggtccccacagactcagagagaacccgccaccatgtttgtttttcttgttttacttcctttagtctcttctcagtgtgtcaatttgacaggcggctctggaggaggcggctccggaggcagaatggctggaaatggaggagatgctgctctggctctgctgctgctggatagactgaatcagctggaatcaaaaatgtctggaaaaggacagcaacagatgagagcttgcatggtgacaaacaacacatttacactgaaagtgcctcatgtgggagaaattcctgtggcttacagaaaagtgctgctgaaaacaattcaaccaagagtggaaaaatacctgtttgatgaatctggagaatttaaactttctgaagtgggacctgaacactctcttgctgaatacaaaatgtgcggatacaaacactggcctcagattgctcagtttgctccttctgcttctgctttctttggaatgagcagaattggaatggaagtgacaccttctggaacatggctgacatacacaggagcaatcaaactggatgataaagatccaaactttaaagatcaggtgattctgctgaacaaacacattgatgcttacaaaacatttcctgctagatgtgctacaactgatccttcttttctgggaagatacatgtctgctctttttgctgatgatttaaatcagttaacaggatatcacacagatttttcttctgaaatcattggataccagttgatgtgtcaaccaattttgttggctgaagctgaattggcaaaaaacgtgtctttgattcttggaacagtttcttggaatcttaaaaaacaaggatttgcatacgcaaatagaaatagatttctgtacattattaaactgatttttctgtggctgctgtggcctgtgacactggcttgctttgtgctggctgctgtgtacagaataaattggataacaggaggaattgcaattgcaatggcatgcttggtgggattgatgtggttgtcttactttattgcttcttttagactgttttacagatcctacttattatctgctggaatttttggagctatcacagatgtgttttacaaagaaaactcatacaaagtgccaacagacaattacataacaacatacgctagaatggctgctccaaaagaaatcatcttccttgaaggagaaacactttttggagatgatacagtgattgaagtgtccatgtttaatctgggaagatgcgatattaaagatctgccaaaagaaattacagtggcaacaagcagaacactgagctactacaaactgggagcaagccagagagtggcaggaggatccggtggtggcggcagcggcggcgaacagtacattaaatggccttggtacatttggcttggatttattgcaggattaattgcaattgtgatggtgacaattatgttatgttgtatgacatcatgttgttcttgtttaaaaggatgttgttcttgtggaagctgttgtaaatttgatgaagatgattctgaacctgtgttaaaaggagtgaaattgcattacacatgatgactcgagctggtactgcatgcacgcaatgctagctgcccctttcccgtcctgggtaccccgagtctcccccgacctcgggtcccaggtatgctcccacctccacctgccccactcaccacctctgctagttccagacacctcccaagcacgcagcaatgcagctcaaaacgcttagcctagccacacccccacgggaaacagcagtgattaacctttagcaataaacgaaagtttaactaagctatactaaccccagggttggtcaatttcgtgccagccacaccctggagctagcaaaaaaaaaaaaaaaaaaaaaaaaaaaaaagcatatgactaaaaaaaaaaaaaaaaaaaaaaaaaaaaaaaaaaaaaaaaaaaaaaaaaaaaaaaaaaaaaaaaaaaaaa

SEQ ID NO: 17505 - DNA, 1536 bp, synthetic construct
  misc_feature 1..1536: note = Description of Artificial Sequence: Synthetic polynucleotide
  source 1..1536: mol_type = other DNA
ggcggctctggaggaggcggctccggaggctctcctgccagaatggctggaaatggaggagatgctgctctggctctgctgctgctggatagactgaatcagctggaaagcaaaatgagcggaaaaggacagcagcagcagggacaaacagtgacaaagaaatctgctgctgaagccagcaagaaaccaagacagaaaagaacagccacaaaagcctacaatgtgacacaggcctttggaagaaggggacctgaacagacacagggaaattttggagatcaggaactgatcagacagggaacagattacaaacactggcctcagatcgcccagtttgccccatctgcctctgccttctttggaatgagcagaattggaatggaagtgacaccttctggaacatggctgacatacacaggagccatcaaactggatgataaagatccaaattttaaagatcaggtgattctgctgaataaacacattgatgcctacaaaacatttccaccaacagaaccaaagaaagataaattcaaagctgctatggtgacaaacaacacatttacactgaaagtgcctcatgtgggagaaattcctgtggcttacagaaaagtgctgctgaaaacaattcaaccaagagtggaaaaatacctgtttgatgaatctggagaatttaaactttctgaagtgggacctgaacactctcttgctgaatactacattttctttgcttctttttactataagaggaatggatttgcatacgcaaatagaaatagatttctgtacattattaaactgatttttctgtggctgctgtggcctgtgacactggcttgctttgtgctggctgctgtgtacagaataaattggataacaggaggaattgcaattgcaatggcatgcttggtgggattgatgtggttgtcttactttattgcttcttttagactgttttacaactcttttcacacaactgatccatcttttctgggaagatacatgtctgctctttttgctgatgatttaaatcagttaacaggatatcacacagatttttcttctgaaatcattggataccagttgatgtgtcaaccaattttgttggctgaagctgaattggcaaaaaacgtgtctttgattcttggaacagtttcttggaatcttaagaaaaacggactgggaagatgcgatattaaagatctgccaaaagaaattacagtggcaacaagcagaacactgagctactacaaactgggagcaagccagagagtggcatacagatcctacttattatctgctggaatttttggagctatcacagatgtgttttacaaagaaaactcatacaaagtgccaacagacaattacataacaacatacgctagaatggctgctccaaaagaaatcatcttccttgaaggagaaacactttttggagatgatacagtgattgaagtggcaattattctggcatctttttctgcatccacaagaagaaggggaggaggatccggtggtggcggcagcggcggc

SEQ ID NO: 17506 - DNA, 2245 bp, synthetic construct
  misc_feature 1..2245: note = Description of Artificial Sequence: Synthetic polynucleotide
  source 1..2245: mol_type = other DNA
attcttctggtccccacagactcagagagaacccgccaccatgtttgtttttcttgttttacttcctttagtctcttctcagtgtgtcaatttgacaggcggctctggaggaggcggctccggaggctctcctgccagaatggctggaaatggaggagatgctgctctggctctgctgctgctggatagactgaatcagctggaaagcaaaatgagcggaaaaggacagcagcagcagggacaaacagtgacaaagaaatctgctgctgaagccagcaagaaaccaagacagaaaagaacagccacaaaagcctacaatgtgacacaggcctttggaagaaggggacctgaacagacacagggaaattttggagatcaggaactgatcagacagggaacagattacaaacactggcctcagatcgcccagtttgccccatctgcctctgccttctttggaatgagcagaattggaatggaagtgacaccttctggaacatggctgacatacacaggagccatcaaactggatgataaagatccaaattttaaagatcaggtgattctgctgaataaacacattgatgcctacaaaacatttccaccaacagaaccaaagaaagataaattcaaagctgctatggtgacaaacaacacatttacactgaaagtgcctcatgtgggagaaattcctgtggcttacagaaaagtgctgctgaaaacaattcaaccaagagtggaaaaatacctgtttgatgaatctggagaatttaaactttctgaagtgggacctgaacactctcttgctgaatactacattttctttgcttctttttactataagaggaatggatttgcatacgcaaatagaaatagatttctgtacattattaaactgatttttctgtggctgctgtggcctgtgacactggcttgctttgtgctggctgctgtgtacagaataaattggataacaggaggaattgcaattgcaatggcatgcttggtgggattgatgtggttgtcttactttattgcttcttttagactgttttacaactcttttcacacaactgatccatcttttctgggaagatacatgtctgctctttttgctgatgatttaaatcagttaacaggatatcacacagatttttcttctgaaatcattggataccagttgatgtgtcaaccaattttgttggctgaagctgaattggcaaaaaacgtgtctttgattcttggaacagtttcttggaatcttaagaaaaacggactgggaagatgcgatattaaagatctgccaaaagaaattacagtggcaacaagcagaacactgagctactacaaactgggagcaagccagagagtggcatacagatcctacttattatctgctggaatttttggagctatcacagatgtgttttacaaagaaaactcatacaaagtgccaacagacaattacataacaacatacgctagaatggctgctccaaaagaaatcatcttccttgaaggagaaacactttttggagatgatacagtgattgaagtggcaattattctggcatctttttctgcatccacaagaagaaggggaggaggatccggtggtggcggcagcggcggcgaacagtacattaaatggccttggtacatttggcttggatttattgcaggattaattgcaattgtgatggtgacaattatgttatgttgtatgacatcatgttgttcttgtttaaaaggatgttgttcttgtggaagctgttgtaaatttgatgaagatgattctgaacctgtgttaaaaggagtgaaattgcattacacatgatgactcgagctggtactgcatgcacgcaatgctagctgcccctttcccgtcctgggtaccccgagtctcccccgacctcgggtcccaggtatgctcccacctccacctgccccactcaccacctctgctagttccagacacctcccaagcacgcagcaatgcagctcaaaacgcttagcctagccacacccccacgggaaacagcagtgattaacctttagcaataaacgaaagtttaactaagctatactaaccccagggttggtcaatttcgtgccagccacaccctggagctagcaaaaaaaaaaaaaaaaaaaaaaaaaaaaaagcatatgactaaaaaaaaaaaaaaaaaaaaaaaaaaaaaaaaaaaaaaaaaaaaaaaaaaaaaaaaaaaaaaaaaaaaaa

SEQ ID NO: 17507 - DNA, 1515 bp, synthetic construct
  misc_feature 1..1515: note = Description of Artificial Sequence: Synthetic polynucleotide
  source 1..1515: mol_type = other DNA
ggcggctctggaggaggcggctccggaggctctcctgccagaatggctggaaatggaggagatgctgctctggctctgctgctgctggatagactgaatcagctggaaagcaaaatgagcggaaaaggacagcagcagcagggacaaacagtgacaaagaaatctgctgctgaagccagcaagaaaccaagacagaaaagaacagccacaaaagcctacaatgtgacacaggcctttggaagaaggggacctgaacagacacagggaaattttggagatcaggaactgatcagacagggaacagattacaaacactggcctcagatcgcccagtttgccccatctgcctctgccttctttggaatgagcagaattggaatggaagtgacaccttctggaacatggctgacatacacaggagccatcaaactggatgataaagatccaaattttaaagatcaggtgattctgctgaataaacacattgatgcctacaaaacatttccaccaacagaaccaaagaaagataaatttagagcttgcatggtgacaaacaacacatttacactgaaagtgcctcatgtgggagaaattcctgtggcttacagaaaagtgctgctgaaaacaattcaaccaagagtggaaaaatacctgtttgatgaatctggagaatttaaactttctgaagtgggacctgaacactctcttgctgaatactacattttctttgcttctttttactataaaagatgttttcacacaactgatccatcttttctgggaagatacatgtctgctctttttgctgatgatttaaatcagttaacaggatatcacacagatttttcttctgaaatcattggataccagttgatgtgtcaaccaattttgttggctgaagctgaattggcaaaaaacgtgtctttgattcttggaacagtttcttggaatcttaaaaagagatacttattatctgctggaatttttggagctatcacagatgtgttttacaaagaaaactcatacaaagtgccaacagacaattacataacaacatacgccagaatggctgctccaaaagaaatcatcttccttgaaggagaaacactttttggagatgatacagtgattgaagtggcaattattctggcatctttttctgcatccacaagaagaaggggaaaactgctggaacagtggaatcttgtgattggatttaatagaaatagatttctttacattattaaattgatttttctttggcttctttggcctgtgacacttgcttgctttgtgcttgctgctgtgtactctgaactggtgattggagctgtgattctgagaggacacctgagaattgctggacaccacctgggaagaacagtggcaacatcaagaacactttcttactacaaactgggagcttctcagagagtgaaaagatactctggcctgatgtggctgagctactttgctagatatgctggaggatccggtggtggcggcagcggcggc

SEQ ID NO: 17508 - DNA, 2224 bp, synthetic construct
  misc_feature 1..2224: note = Description of Artificial Sequence: Synthetic polynucleotide
  source 1..2224: mol_type = other DNA
attcttctggtccccacagactcagagagaacccgccaccatgtttgtttttcttgttttacttcctttagtctcttctcagtgtgtcaatttgacaggcggctctggaggaggcggctccggaggctctcctgccagaatggctggaaatggaggagatgctgctctggctctgctgctgctggatagactgaatcagctggaaagcaaaatgagcggaaaaggacagcagcagcagggacaaacagtgacaaagaaatctgctgctgaagccagcaagaaaccaagacagaaaagaacagccacaaaagcctacaatgtgacacaggcctttggaagaaggggacctgaacagacacagggaaattttggagatcaggaactgatcagacagggaacagattacaaacactggcctcagatcgcccagtttgccccatctgcctctgccttctttggaatgagcagaattggaatggaagtgacaccttctggaacatggctgacatacacaggagccatcaaactggatgataaagatccaaattttaaagatcaggtgattctgctgaataaacacattgatgcctacaaaacatttccaccaacagaaccaaagaaagataaatttagagcttgcatggtgacaaacaacacatttacactgaaagtgcctcatgtgggagaaattcctgtggcttacagaaaagtgctgctgaaaacaattcaaccaagagtggaaaaatacctgtttgatgaatctggagaatttaaactttctgaagtgggacctgaacactctcttgctgaatactacattttctttgcttctttttactataaaagatgttttcacacaactgatccatcttttctgggaagatacatgtctgctctttttgctgatgatttaaatcagttaacaggatatcacacagatttttcttctgaaatcattggataccagttgatgtgtcaaccaattttgttggctgaagctgaattggcaaaaaacgtgtctttgattcttggaacagtttcttggaatcttaaaaagagatacttattatctgctggaatttttggagctatcacagatgtgttttacaaagaaaactcatacaaagtgccaacagacaattacataacaacatacgccagaatggctgctccaaaagaaatcatcttccttgaaggagaaacactttttggagatgatacagtgattgaagtggcaattattctggcatctttttctgcatccacaagaagaaggggaaaactgctggaacagtggaatcttgtgattggatttaatagaaatagatttctttacattattaaattgatttttctttggcttctttggcctgtgacacttgcttgctttgtgcttgctgctgtgtactctgaactggtgattggagctgtgattctgagaggacacctgagaattgctggacaccacctgggaagaacagtggcaacatcaagaacactttcttactacaaactgggagcttctcagagagtgaaaagatactctggcctgatgtggctgagctactttgctagatatgctggaggatccggtggtggcggcagcggcggcgaacagtacattaaatggccttggtacatttggcttggatttattgcaggattaattgcaattgtgatggtgacaattatgttatgttgtatgacatcatgttgttcttgtttaaaaggatgttgttcttgtggaagctgttgtaaatttgatgaagatgattctgaacctgtgttaaaaggagtgaaattgcattacacatgatgactcgagctggtactgcatgcacgcaatgctagctgcccctttcccgtcctgggtaccccgagtctcccccgacctcgggtcccaggtatgctcccacctccacctgccccactcaccacctctgctagttccagacacctcccaagcacgcagcaatgcagctcaaaacgcttagcctagccacacccccacgggaaacagcagtgattaacctttagcaataaacgaaagtttaactaagctatactaaccccagggttggtcaatttcgtgccagccacaccctggagctagcaaaaaaaaaaaaaaaaaaaaaaaaaaaaaagcatatgactaaaaaaaaaaaaaaaaaaaaaaaaaaaaaaaaaaaaaaaaaaaaaaaaaaaaaaaaaaaaaaaaaaaaaa

SEQ ID NO: 17509 - protein, 8 aa, synthetic construct
  REGION 1..8: note = Description of Artificial Sequence: Synthetic peptide
AADLDDFS

SEQ ID NO: 17510 - protein, 10 aa, synthetic construct
  REGION 1..10: note = Description of Artificial Sequence: Synthetic peptide
AADLDDFSKQ

SEQ ID NO: 17511 - protein, 11 aa, synthetic construct
  REGION 1..11: note = Description of Artificial Sequence: Synthetic peptide
AAEASKKPRQK

SEQ ID NO: 17512 - protein, 8 aa, synthetic construct
  REGION 1..8: note = Description of Artificial Sequence: Synthetic peptide
AGDSGFAA

SEQ ID NO: 17513 - protein, 10 aa, synthetic construct
  REGION 1..10: note = Description of Artificial Sequence: Synthetic peptide
AGDSGFAAYS

SEQ ID NO: 17514 - protein, 11 aa, synthetic construct
  REGION 1..11: note = Description of Artificial Sequence: Synthetic peptide
AGLPYGANKDG

SEQ ID NO: 17515 - protein, 11 aa, synthetic construct
  REGION 1..11: note = Description of Artificial Sequence: Synthetic peptide
AGNGGDAALAL

SEQ ID NO: 17516 - protein, 10 aa, synthetic construct
  REGION 1..10: note = Description of Artificial Sequence: Synthetic peptide
AIILASFSAS

SEQ ID NO: 17517 - protein, 8 aa, synthetic construct
  REGION 1..8: note = Description of Artificial Sequence: Synthetic peptide
AIKLDDKD

SEQ ID NO: 17518 - protein, 11 aa, synthetic construct
  REGION 1..11: note = Description of Artificial Sequence: Synthetic peptide
AIKLDDKDPNF

SEQ ID NO: 17519 - protein, 12 aa, synthetic construct
  REGION 1..12: note = Description of Artificial Sequence: Synthetic peptide
AIVLQLPQGTTL

SEQ ID NO: 17520 - protein, 9 aa, synthetic construct
  REGION 1..9: note = Description of Artificial Sequence: Synthetic peptide
ALNTPKDHI

SEQ ID NO: 17521 - protein, 10 aa, synthetic construct
  REGION 1..10: note = Description of Artificial Sequence: Synthetic peptide
AMACLVGLMW

SEQ ID NO: 17522 - protein, 12 aa, synthetic construct
  REGION 1..12: note = Description of Artificial Sequence: Synthetic peptide
APKEIIFLEGET

SEQ ID NO: 17523 - protein, 9 aa, synthetic construct
  REGION 1..9: note = Description of Artificial Sequence: Synthetic peptide
APSASAFFG

SEQ ID NO: 17524 - protein, 10 aa, synthetic construct
  REGION 1..10: note = Description of Artificial Sequence: Synthetic peptide
ARMAGNGGDA

SEQ ID NO: 17525 - protein, 11 aa, synthetic construct
  REGION 1..11: note = Description of Artificial Sequence: Synthetic peptide
ARMAGNGGDAA

SEQ ID NO: 17526 - protein, 12 aa, synthetic construct
  REGION 1..12: note = Description of Artificial Sequence: Synthetic peptide
ARMAGNGGDAAL

SEQ ID NO: 17527 - protein, 10 aa, synthetic construct
  REGION 1..10: note = Description of Artificial Sequence: Synthetic peptide
ASAFFGMSRI

SEQ ID NO: 17528 - protein, 11 aa, synthetic construct
  REGION 1..11: note = Description of Artificial Sequence: Synthetic peptide
ASKKPRQKRTA

SEQ ID NO: 17529 - protein, 12 aa, synthetic construct
  REGION 1..12: note = Description of Artificial Sequence: Synthetic peptide
ASKKPRQKRTAT

SEQ ID NO: 17530 - protein, 11 aa, synthetic construct
  REGION 1..11: note = Description of Artificial Sequence: Synthetic peptide
ASQRVAGDSGF

SEQ ID NO: 17531 - protein, 11 aa, synthetic construct
  REGION 1..11: note = Description of Artificial Sequence: Synthetic peptide
ATKAYNVTQAF

SEQ ID NO: 17532 - protein, 11 aa, synthetic construct
  REGION 1..11: note = Description of Artificial Sequence: Synthetic peptide
ATSRTLSYYKL

SEQ ID NO: 17533 - protein, 11 aa, synthetic construct
  REGION 1..11: note = Description of Artificial Sequence: Synthetic peptide
AVILRGHLRIA

SEQ ID NO: 17534 - protein, 9 aa, synthetic construct
  REGION 1..9: note = Description of Artificial Sequence: Synthetic peptide
AVYRINWIT

SEQ ID NO: 17535 - protein, 10 aa, synthetic construct
  REGION 1..10: note = Description of Artificial Sequence: Synthetic peptide
AYKTFPPTEP

SEQ ID NO: 17536 - protein, 11 aa, synthetic construct
  REGION 1..11: note = Description of Artificial Sequence: Synthetic peptide
AYKTFPPTEPK

SEQ ID NO: 17537 - protein, 12 aa, synthetic construct
  REGION 1..12: note = Description of Artificial Sequence: Synthetic peptide
AYKTFPPTEPKK

SEQ ID NO: 17538 - protein, 11 aa, synthetic construct
  REGION 1..11: note = Description of Artificial Sequence: Synthetic peptide
AYNVTQAFGRR

SEQ ID NO: 17539 - protein, 11 aa, synthetic construct
  REGION 1..11: note = Description of Artificial Sequence: Synthetic peptide
AYSRYRIGNYK

SEQ ID NO: 17540 - protein, 10 aa, synthetic construct
  REGION 1..10: note = Description of Artificial Sequence: Synthetic peptide
DAYKTFPPTE

SEQ ID NO: 17541 - protein, 11 aa, synthetic construct
  REGION 1..11: note = Description of Artificial Sequence: Synthetic peptide
DDFSKQLQQSM

SEQ ID NO: 17542 - protein, 9 aa, synthetic construct
  REGION 1..9: note = Description of Artificial Sequence: Synthetic peptide
DDKDPNFKD

SEQ ID NO: 17543 - protein, 11 aa, synthetic construct
  REGION 1..11: note = Description of Artificial Sequence: Synthetic peptide
DDKDPNFKDQV

SEQ ID NO: 17544 - protein, 12 aa, synthetic construct
  REGION 1..12: note = Description of Artificial Sequence: Synthetic peptide
DDKDPNFKDQVI

SEQ ID NO: 17545 - protein, 8 aa, synthetic construct
  REGION 1..8: note = Description of Artificial Sequence: Synthetic peptide
DHIGTRNP

SEQ ID NO: 17546 - protein, 10 aa, synthetic construct
  REGION 1..10: note = Description of Artificial Sequence: Synthetic peptide
DHSSSSDNIA

SEQ ID NO: 17547 - protein, 12 aa, synthetic construct
  REGION 1..12: note = Description of Artificial Sequence: Synthetic peptide
DIKDLPKEITVA

SEQ ID NO: 17548 - protein, 11 aa, synthetic construct
  REGION 1..11: note = Description of Artificial Sequence: Synthetic peptide
DKDPNFKDQVI

SEQ ID NO: 17549 - protein, 8 aa, synthetic construct
  REGION 1..8: note = Description of Artificial Sequence: Synthetic peptide
DKKKKADE

SEQ ID NO: 17550 - protein, 12 aa, synthetic construct
  REGION 1..12: note = Description of Artificial Sequence: Synthetic peptide
DLPKEITVATSR

SEQ ID NO: 17551 - protein, 8 aa, synthetic construct
  REGION 1..8: note = Description of Artificial Sequence: Synthetic peptide
DLSPRWYF

SEQ ID NO: 17552 - protein, 11 aa, synthetic construct
  REGION 1..11: note = Description of Artificial Sequence: Synthetic peptide
DLSPRWYFYYL

SEQ ID NO: 17553 - protein, 11 aa, synthetic construct
  REGION 1..11: note = Description of Artificial Sequence: Synthetic peptide
DPSFLGRYMSA

SEQ ID NO: 17554 - protein, 10 aa, synthetic construct
  REGION 1..10: note = Description of Artificial Sequence: Synthetic peptide
DSGFAAYSRY

SEQ ID NO: 17555 - protein, 11 aa, synthetic construct
  REGION 1..11: note = Description of Artificial Sequence: Synthetic peptide
DSGFAAYSRYR

SEQ ID NO: 17556 - protein, 11 aa, synthetic construct
  REGION 1..11: note = Description of Artificial Sequence: Synthetic peptide
DSNGTITVEEL

SEQ ID NO: 17557 - protein, 8 aa, synthetic construct
  REGION 1..8: note = Description of Artificial Sequence: Synthetic peptide
DYKHWPQI

SEQ ID NO: 17558 - protein, 9 aa, synthetic construct
  REGION 1..9: note = Description of Artificial Sequence: Synthetic peptide
DYKHWPQIA

SEQ ID NO: 17559 - protein, 10 aa, synthetic construct
  REGION 1..10: note = Description of Artificial Sequence: Synthetic peptide
DYKHWPQIAQ

SEQ ID NO: 17560 - protein, 9 aa, synthetic construct
  REGION 1..9: note = Description of Artificial Sequence: Synthetic peptide
EAGLPYGAN

SEQ ID NO: 17561 - protein, 11 aa, synthetic construct
  REGION 1..11: note = Description of Artificial Sequence: Synthetic peptide
EIPVAYRKVLL

SEQ ID NO: 17562 - protein, 12 aa, synthetic construct
  REGION 1..12: note = Description of Artificial Sequence: Synthetic peptide
EITVATSRTLSY

SEQ ID NO: 17563 - protein, 10 aa, synthetic construct
  REGION 1..10: note = Description of Artificial Sequence: Synthetic peptide
ELIRQGTDYK

SEQ ID NO: 17564 - protein, 12 aa, synthetic construct
  REGION 1..12: note = Description of Artificial Sequence: Synthetic peptide
EPKKDKKKKADE

SEQ ID NO: 17565 - protein, 11 aa, synthetic construct
  REGION 1..11: note = Description of Artificial Sequence: Synthetic peptide
EQWNLVIGFLF

SEQ ID NO: 17566 - protein, 12 aa, synthetic construct
  REGION 1..12: note = Description of Artificial Sequence: Synthetic peptide
EQWNLVIGFLFL

SEQ ID NO: 17567 - protein, 11 aa, synthetic construct
  REGION 1..11: note = Description of Artificial Sequence: Synthetic peptide
ESELVIGAVIL

SEQ ID NO: 17568 - protein, 12 aa, synthetic construct
  REGION 1..12: note = Description of Artificial Sequence: Synthetic peptide
ESELVIGAVILR

SEQ ID NO: 17569 - protein, 11 aa, synthetic construct
  REGION 1..11: note = Description of Artificial Sequence: Synthetic peptide
ETNILLNVPLH

SEQ ID NO: 17570 - protein, 11 aa, synthetic construct
  REGION 1..11: note = Description of Artificial Sequence: Synthetic peptide
ETQALPQRQKK

SEQ ID NO: 17571 - protein, 10 aa, synthetic construct
  REGION 1..10: note = Description of Artificial Sequence: Synthetic peptide
EVGPEHSLAE

SEQ ID NO: 17572 - protein, 10 aa, synthetic construct
  REGION 1..10: note = Description of Artificial Sequence: Synthetic peptide
EVTPSGTWLT

SEQ ID NO: 17573 - protein, 12 aa, synthetic construct
  REGION 1..12: note = Description of Artificial Sequence: Synthetic peptide
FAAYSRYRIGNY

SEQ ID NO: 17574 - protein, 11 aa, synthetic construct
  REGION 1..11: note = Description of Artificial Sequence: Synthetic peptide
FAPSASAFFGM

SEQ ID NO: 17575 - protein, 8 aa, synthetic construct
  REGION 1..8: note = Description of Artificial Sequence: Synthetic peptide
FARTRSMW

SEQ ID NO: 17576 - protein, 8 aa, synthetic construct
  REGION 1..8: note = Description of Artificial Sequence: Synthetic peptide
FDESGEFK

SEQ ID NO: 17577 - protein, 8 aa, synthetic construct
  REGION 1..8: note = Description of Artificial Sequence: Synthetic peptide
FGMSRIGM

SEQ ID NO: 17578 - protein, 11 aa, synthetic construct
  REGION 1..11: note = Description of Artificial Sequence: Synthetic peptide
FLWLLWPVTLA

SEQ ID NO: 17579 - protein, 12 aa, synthetic construct
  REGION 1..12: note = Description of Artificial Sequence: Synthetic peptide
FLYIIKLIFLWL

SEQ ID NO: 17580 - protein, 12 aa, synthetic construct
  REGION 1..12: note = Description of Artificial Sequence: Synthetic peptide
FPPTEPKKDKKK

SEQ ID NO: 17581 - protein, 10 aa, synthetic construct
  REGION 1..10: note = Description of Artificial Sequence: Synthetic peptide
FRLFARTRSM

SEQ ID NO: 17582 - protein, 11 aa, synthetic construct
  REGION 1..11: note = Description of Artificial Sequence: Synthetic peptide
FVLAAVYRINW

SEQ ID NO: 17583 - protein, 11 aa, synthetic construct
  REGION 1..11: note = Description of Artificial Sequence: Synthetic peptide
FYYLGTGPEAG

SEQ ID NO: 17584 - protein, 12 aa, synthetic construct
  REGION 1..12: note = Description of Artificial Sequence: Synthetic peptide
FYYLGTGPEAGL

SEQ ID NO: 17585 - protein, 11 aa, synthetic construct
  REGION 1..11: note = Description of Artificial Sequence: Synthetic peptide
GANKDGIIWVA

SEQ ID NO: 17586 - protein, 10 aa, synthetic construct
  REGION 1..10: note = Description of Artificial Sequence: Synthetic peptide
GDAALALLLL

SEQ ID NO: 17587 - protein, 8 aa, synthetic construct
  REGION 1..8: note = Description of Artificial Sequence: Synthetic peptide
GDSGFAAY

SEQ ID NO: 17588 - protein, 10 aa, synthetic construct
  REGION 1..10: note = Description of Artificial Sequence: Synthetic peptide
GFLFLTWICL

SEQ ID NO: 17589 - protein, 11 aa, synthetic construct
  REGION 1..11: note = Description of Artificial Sequence: Synthetic peptide
GGDAALALLLL

SEQ ID NO: 17590 - protein, 8 aa, synthetic construct
  REGION 1..8: note = Description of Artificial Sequence: Synthetic peptide
GHHLGRCD

SEQ ID NO: 17591 - protein, 9 aa, synthetic construct
  REGION 1..9: note = Description of Artificial Sequence: Synthetic peptide
GIAIAMACL

SEQ ID NO: 17592 - protein, 8 aa, synthetic construct
  REGION 1..8: note = Description of Artificial Sequence: Synthetic peptide
GLPYGANK

SEQ ID NO: 17593 - protein, 11 aa, synthetic construct
  REGION 1..11: note = Description of Artificial Sequence: Synthetic peptide
GLPYGANKDGI

SEQ ID NO: 17594 - protein, 10 aa, synthetic construct
  REGION 1..10: note = Description of Artificial Sequence: Synthetic peptide
GNGGDAALAL

SEQ ID NO: 17595 - protein, 12 aa, synthetic construct
  REGION 1..12: note = Description of Artificial Sequence: Synthetic peptide
GNGGDAALALLL

SEQ ID NO: 17596 - protein, 11 aa, synthetic construct
  REGION 1..11: note = Description of Artificial Sequence: Synthetic peptide
GRCDIKDLPKE

SEQ ID NO: 17597 - protein, 11 aa, synthetic construct
  REGION 1..11: note = Description of Artificial Sequence: Synthetic peptide
GSRGGSQASSR

SEQ ID NO: 17598 - protein, 10 aa, synthetic construct
  REGION 1..10: note = Description of Artificial Sequence: Synthetic peptide
GSSRGTSPAR

SEQ ID NO: 17599 - protein, 10 aa, synthetic construct
  REGION 1..10: note = Description of Artificial Sequence: Synthetic peptide
GTILTRPLLE

SEQ ID NO: 17600 - protein, 11 aa, synthetic construct
  REGION 1..11: note = Description of Artificial Sequence: Synthetic peptide
GTITVEELKKL

SEQ ID NO: 17601 - protein, 10 aa, synthetic construct
  REGION 1..10: note = Description of Artificial Sequence: Synthetic peptide
GTRNPANNAA

SEQ ID NO: 17602 - protein, 8 aa, synthetic construct
  REGION 1..8: note = Description of Artificial Sequence: Synthetic peptide
HGTILTRP

SEQ ID NO: 17603 - protein, 9 aa, synthetic construct
  REGION 1..9: note = Description of Artificial Sequence: Synthetic peptide
HGTILTRPL

SEQ ID NO: 17604 - protein, 10 aa, synthetic construct
  REGION 1..10: note = Description of Artificial Sequence: Synthetic peptide
HGTILTRPLL

SEQ ID NO: 17605 - protein, 8 aa, synthetic construct
  REGION 1..8: note = Description of Artificial Sequence: Synthetic peptide
HHLGRCDI

SEQ ID NO: 17606 - protein, 10 aa, synthetic construct
  REGION 1..10: note = Description of Artificial Sequence: Synthetic peptide
HIDAYKTFPP

SEQ ID NO: 17607 - protein, 11 aa, synthetic construct
  REGION 1..11: note = Description of Artificial Sequence: Synthetic peptide
HLRIAGHHLGR

SEQ ID NO: 17608 - protein, 8 aa, synthetic construct
  REGION 1..8: note = Description of Artificial Sequence: Synthetic peptide
HSSSSDNI

SEQ ID NO: 17609 - protein, 11 aa, synthetic construct
  REGION 1..11: note = Description of Artificial Sequence: Synthetic peptide
HSSSSDNIALL

SEQ ID NO: 17610 - protein, 12 aa, synthetic construct
  REGION 1..12: note = Description of Artificial Sequence: Synthetic peptide
HTTDPSFLGRYM

SEQ ID NO: 17611 - protein, 11 aa, synthetic construct
  REGION 1..11: note = Description of Artificial Sequence: Synthetic peptide
HVGEIPVAYRK

SEQ ID NO: 17612 - protein, 12 aa, synthetic construct
  REGION 1..12: note = Description of Artificial Sequence: Synthetic peptide
HVGEIPVAYRKV

SEQ ID NO: 17613 - protein, 10 aa, synthetic construct
  REGION 1..10: note = Description of Artificial Sequence: Synthetic peptide
IAQFAPSASA

SEQ ID NO: 17614 - protein, 11 aa, synthetic construct
  REGION 1..11: note = Description of Artificial Sequence: Synthetic peptide
IAQFAPSASAF

SEQ ID NO: 17615 - protein, 8 aa, synthetic construct
  REGION 1..8: note = Description of Artificial Sequence: Synthetic peptide
IASFRLFA

SEQ ID NO: 17616 - protein, 11 aa, synthetic construct
  REGION 1..11: note = Description of Artificial Sequence: Synthetic peptide
IGMEVTPSGTW

SEQ ID NO: 17617 - protein, 10 aa, synthetic construct
  REGION 1..10: note = Description of Artificial Sequence: Synthetic peptide
IIKLIFLWLL

SEQ ID NO: 17618 - protein, 11 aa, synthetic construct
  REGION 1..11: note = Description of Artificial Sequence: Synthetic peptide
IIKLIFLWLLW

SEQ ID NO: 17619 - protein, 9 aa, synthetic construct
  REGION 1..9: note = Description of Artificial Sequence: Synthetic peptide
IIWVATEGA

SEQ ID NO: 17620 - protein, 10 aa, synthetic construct
  REGION 1..10: note = Description of Artificial Sequence: Synthetic peptide
IIWVATEGAL

SEQ ID NO: 17621 - protein, 10 aa, synthetic construct
  REGION 1..10: note = Description of Artificial Sequence: Synthetic peptide
IKDLPKEITV

SEQ ID NO: 17622 - protein, 11 aa, synthetic construct
  REGION 1..11: note = Description of Artificial Sequence: Synthetic peptide
IKDLPKEITVA

SEQ ID NO: 17623 - protein, 11 aa, synthetic construct
  REGION 1..11: note = Description of Artificial Sequence: Synthetic peptide
ILLNVPLHGTI

SEQ ID NO: 17624 - protein, 11 aa, synthetic construct
  REGION 1..11: note = Description of Artificial Sequence: Synthetic peptide
ILTRPLLESEL

SEQ ID NO: 17625 - protein, 10 aa, synthetic construct
  REGION 1..10: note = Description of Artificial Sequence: Synthetic peptide
ITGGIAIAMA

SEQ ID NO: 17626 - protein, 12 aa, synthetic construct
  REGION 1..12: note = Description of Artificial Sequence: Synthetic peptide
ITVATSRTLSYY

SEQ ID NO: 17627 - protein, 11 aa, synthetic construct
  REGION 1..11: note = Description of Artificial Sequence: Synthetic peptide
ITVEELKKLLE

SEQ ID NO: 17628 - protein, 11 aa, synthetic construct
  REGION 1..11: note = Description of Artificial Sequence: Synthetic peptide
IVLQLPQGTTL

SEQ ID NO: 17629 - protein, 12 aa, synthetic construct
  REGION 1..12: note = Description of Artificial Sequence: Synthetic peptide
KAYNVTQAFGRR

SEQ ID NO: 17630 - protein, 9 aa, synthetic construct
  REGION 1..9: note = Description of Artificial Sequence: Synthetic peptide
KDGIIWVAT

SEQ ID NO: 17631 - protein, 9 aa, synthetic construct
  REGION 1..9: note = Description of Artificial Sequence: Synthetic peptide
KDHIGTRNP

SEQ ID NO: 17632 - protein, 10 aa, synthetic construct
  REGION 1..10: note = Description of Artificial Sequence: Synthetic peptide
KDLPKEITVA

SEQ ID NO: 17633 - protein, 11 aa, synthetic construct
  REGION 1..11: note = Description of Artificial Sequence: Synthetic peptide
KDLSPRWYFYY

SEQ ID NO: 17634 - protein, 10 aa, synthetic construct
  REGION 1..10: note = Description of Artificial Sequence: Synthetic peptide
KEIIFLEGET

SEQ ID NO: 17635 - protein, 10 aa, synthetic construct
  REGION 1..10: note = Description of Artificial Sequence: Synthetic peptide
KEITVATSRT

SEQ ID NO: 17636 - protein, 10 aa, synthetic construct
  REGION 1..10: note = Description of Artificial Sequence: Synthetic peptide
KHWPQIAQFA

SEQ ID NO: 17637 - protein, 11 aa, synthetic construct
  REGION 1..11: note = Description of Artificial Sequence: Synthetic peptide
KHWPQIAQFAP

SEQ ID NO: 17638 - protein, 9 aa, synthetic construct
  REGION 1..9: note = Description of Artificial Sequence: Synthetic peptide
KKDKKKKAD

SEQ ID NO: 17639 - protein, 9 aa, synthetic construct
  REGION 1..9: note = Description of Artificial Sequence: Synthetic peptide
KKKADETQA

SEQ ID NO: 17640 - protein, 11 aa, synthetic construct
  REGION 1..11: note = Description of Artificial Sequence: Synthetic peptide
KKKKADETQAL

SEQ ID NO: 17641 - protein, 11 aa, synthetic construct
  REGION 1..11: note = Description of Artificial Sequence: Synthetic peptide
KLDDKDPNFKD

SEQ ID NO: 17642 - protein, 11 aa, synthetic construct
  REGION 1..11: note = Description of Artificial Sequence: Synthetic peptide
KLIFLWLLWPV

SEQ ID NO: 17643 - protein, 11 aa, synthetic construct
  REGION 1..11: note = Description of Artificial Sequence: Synthetic peptide
KPRQKRTATKA

SEQ ID NO: 17644 - protein, 11 aa, synthetic construct
  REGION 1..11: note = Description of Artificial Sequence: Synthetic peptide
KSAAEASKKPR

SEQ ID NO: 17645 - protein, 11 aa, synthetic construct
  REGION 1..11: note = Description of Artificial Sequence: Synthetic peptide
KTFPPTEPKKD

SEQ ID NO: 17646 - protein, 12 aa, synthetic construct
  REGION 1..12: note = Description of Artificial Sequence: Synthetic peptide
KTFPPTEPKKDK

SEQ ID NO: 17647 - protein, 8 aa, synthetic construct
  REGION 1..8: note = Description of Artificial Sequence: Synthetic peptide
KVPTDNYI

SEQ ID NO: 17648 - protein, 9 aa, synthetic construct
  REGION 1..9: note = Description of Artificial Sequence: Synthetic peptide
KVPTDNYIT

SEQ ID NO: 17649 - protein, 8 aa, synthetic construct
  REGION 1..8: note = Description of Artificial Sequence: Synthetic peptide
LDDKDPNF

SEQ ID NO: 17650 - protein, 9 aa, synthetic construct
  REGION 1..9: note = Description of Artificial Sequence: Synthetic peptide
LDDKDPNFK

SEQ ID NO: 17651 - protein, 8 aa, synthetic construct
  REGION 1..8: note = Description of Artificial Sequence: Synthetic peptide
LDRLNQLE

SEQ ID NO: 17652 - protein, 10 aa, synthetic construct
  REGION 1..10: note = Description of Artificial Sequence: Synthetic peptide
LESELVIGAV

SEQ ID NO: 17653 - protein, 12 aa, synthetic construct
  REGION 1..12: note = Description of Artificial Sequence: Synthetic peptide
LESELVIGAVIL

SEQ ID NO: 17654 - protein, 9 aa, synthetic construct
  REGION 1..9: note = Description of Artificial Sequence: Synthetic peptide
LFARTRSMW

SEQ ID NO: 17655 - protein, 11 aa, synthetic construct
  REGION 1..11: note = Description of Artificial Sequence: Synthetic peptide
LFARTRSMWSF

SEQ ID NO: 17656 - protein, 9 aa, synthetic construct
  REGION 1..9: note = Description of Artificial Sequence: Synthetic peptide
LGTGPEAGL

SEQ ID NO: 17657 - protein, 9 aa, synthetic construct
  REGION 1..9: note = Description of Artificial Sequence: Synthetic peptide
LHGTILTRP

SEQ ID NO: 17658 - protein, 10 aa, synthetic construct
  REGION 1..10: note = Description of Artificial Sequence: Synthetic peptide
LHGTILTRPL

SEQ ID NO: 17659 - protein, 11 aa, synthetic construct
  REGION 1..11: note = Description of Artificial Sequence: Synthetic peptide
LHGTILTRPLL

SEQ ID NO: 17660 - protein, 8 aa, synthetic construct
  REGION 1..8: note = Description of Artificial Sequence: Synthetic peptide
LIFLWLLW

SEQ ID NO: 17661 - protein, 10 aa, synthetic construct
  REGION 1..10: note = Description of Artificial Sequence: Synthetic peptide
LIFLWLLWPV

SEQ ID NO: 17662 - protein, 9 aa, synthetic construct
  REGION 1..9: note = Description of Artificial Sequence: Synthetic peptide
LIRQGTDYK

SEQ ID NO: 17663 - protein, 11 aa, synthetic construct
  REGION 1..11: note = Description of Artificial Sequence: Synthetic peptide
LIRQGTDYKHW

SEQ ID NO: 17664 - protein, 11 aa, synthetic construct
  REGION 1..11: note = Description of Artificial Sequence: Synthetic peptide
LLESELVIGAV

SEQ ID NO: 17665 - protein, 11 aa, synthetic construct
  REGION 1..11: note = Description of Artificial Sequence: Synthetic peptide
LLNKHIDAYKT

SEQ ID NO: 17666 - protein, 12 aa, synthetic construct
  REGION 1..12: note = Description of Artificial Sequence: Synthetic peptide
LLNKHIDAYKTF

SEQ ID NO: 17667 - protein, 10 aa, synthetic construct
  REGION 1..10: note = Description of Artificial Sequence: Synthetic peptide
LLNVPLHGTI

SEQ ID NO: 17668 - protein, 11 aa, synthetic construct
  REGION 1..11: note = Description of Artificial Sequence: Synthetic peptide
LLNVPLHGTIL

SEQ ID NO: 17669 - protein, 10 aa, synthetic construct
  REGION 1..10: note = Description of Artificial Sequence: Synthetic peptide
LLPAADLDDF

SEQ ID NO: 17670 - protein, 11 aa, synthetic construct
  REGION 1..11: note = Description of Artificial Sequence: Synthetic peptide
LLQFAYANRNR

SEQ ID NO: 17671 - protein, 11 aa, synthetic construct
  REGION 1..11: note = Description of Artificial Sequence: Synthetic peptide
LLWPVTLACFV

SEQ ID NO: 17672 - protein, 12 aa, synthetic construct
  REGION 1..12: note = Description of Artificial Sequence: Synthetic peptide
LLWPVTLACFVL

SEQ ID NO: 17673 - protein, 11 aa, synthetic construct
  REGION 1..11: note = Description of Artificial Sequence: Synthetic peptide
LMWLSYFIASF

SEQ ID NO: 17674 - protein, 9 aa, synthetic construct
  REGION 1..9: note = Description of Artificial Sequence: Synthetic peptide
LNVPLHGTI

SEQ ID NO: 17675 - protein, 10 aa, synthetic construct
  REGION 1..10: note = Description of Artificial Sequence: Synthetic peptide
LNVPLHGTIL

SEQ ID NO: 17676 - protein, 10 aa, synthetic construct
  REGION 1..10: note = Description of Artificial Sequence: Synthetic peptide
LPKEITVATS

SEQ ID NO: 17677 - protein, 11 aa, synthetic construct
  REGION 1..11: note = Description of Artificial Sequence: Synthetic peptide
LPKEITVATSR

SEQ ID NO: 17678 - protein, 8 aa, synthetic construct
  REGION 1..8: note = Description of Artificial Sequence: Synthetic peptide
LPQGTTLP

SEQ ID NO: 17679 - protein, 9 aa, synthetic construct
  REGION 1..9: note = Description of Artificial Sequence: Synthetic peptide
LPQGTTLPK

SEQ ID NO: 17680 - protein, 10 aa, synthetic construct
  REGION 1..10: note = Description of Artificial Sequence: Synthetic peptide
LPQGTTLPKG

SEQ ID NO: 17681 - protein, 11 aa, synthetic construct
  REGION 1..11: note = Description of Artificial Sequence: Synthetic peptide
LPQRQKKQQTV

SEQ ID NO: 17682 - protein, 11 aa, synthetic construct
  REGION 1..11: note = Description of Artificial Sequence: Synthetic peptide
LPYGANKDGII

SEQ ID NO: 17683 - protein, 12 aa, synthetic construct
  REGION 1..12: note = Description of Artificial Sequence: Synthetic peptide
LPYGANKDGIIW

SEQ ID NO: 17684 - protein, 11 aa, synthetic construct
  REGION 1..11: note = Description of Artificial Sequence: Synthetic peptide
LQLPQGTTLPK

SEQ ID NO: 17685 - protein, 8 aa, synthetic construct
  REGION 1..8: note = Description of Artificial Sequence: Synthetic peptide
LQQSMSSA

SEQ ID NO: 17686 - protein, 10 aa, synthetic construct
  REGION 1..10: note = Description of Artificial Sequence: Synthetic peptide
LSYFIASFRL

SEQ ID NO: 17687 - protein, 11 aa, synthetic construct
  REGION 1..11: note = Description of Artificial Sequence: Synthetic peptide
LSYYKLGASQR

SEQ ID NO: 17688 - protein, 10 aa, synthetic construct
  REGION 1..10: note = Description of Artificial Sequence: Synthetic peptide
LTRPLLESEL

SEQ ID NO: 17689 - protein, 8 aa, synthetic construct
  REGION 1..8: note = Description of Artificial Sequence: Synthetic peptide
LTYTGAIK

SEQ ID NO: 17690 - protein, 10 aa, synthetic construct
  REGION 1..10: note = Description of Artificial Sequence: Synthetic peptide
LWPVTLACFV

SEQ ID NO: 17691 - protein, 11 aa, synthetic construct
  REGION 1..11: note = Description of Artificial Sequence: Synthetic peptide
LWPVTLACFVL

SEQ ID NO: 17692 - protein, 12 aa, synthetic construct
  REGION 1..12: note = Description of Artificial Sequence: Synthetic peptide
MAGNGGDAALAL

SEQ ID NO: 17693 - protein, 11 aa, synthetic construct
  REGION 1..11: note = Description of Artificial Sequence: Synthetic peptide
MEVTPSGTWLT

SEQ ID NO: 17694 - protein, 11 aa, synthetic construct
  REGION 1..11: note = Description of Artificial Sequence: Synthetic peptide
MWLSYFIASFR

SEQ ID NO: 17695 - protein, 10 aa, synthetic construct
  REGION 1..10: note = Description of Artificial Sequence: Synthetic peptide
MWSFNPETNI

SEQ ID NO: 17696 - protein, 11 aa, synthetic construct
  REGION 1..11: note = Description of Artificial Sequence: Synthetic peptide
MWSFNPETNIL

SEQ ID NO: 17697 - protein, 12 aa, synthetic construct
  REGION 1..12: note = Description of Artificial Sequence: Synthetic peptide
MWSFNPETNILL

SEQ ID NO: 17698 - protein, 10 aa, synthetic construct
  REGION 1..10: note = Description of Artificial Sequence: Synthetic peptide
NFKDQVILLN

SEQ ID NO: 17699 - protein, 11 aa, synthetic construct
  REGION 1..11: note = Description of Artificial Sequence: Synthetic peptide
NFKDQVILLNK

SEQ ID NO: 17700 - protein, 11 aa, synthetic construct
  REGION 1..11: note = Description of Artificial Sequence: Synthetic peptide
NLVIGFLFLTW

SEQ ID NO: 17701 - protein, 12 aa, synthetic construct
  REGION 1..12: note = Description of Artificial Sequence: Synthetic peptide
NPANNAAIVLQL

SEQ ID NO: 17702 - protein, 12 aa, synthetic construct
  REGION 1..12: note = Description of Artificial Sequence: Synthetic peptide
NPETNILLNVPL

SEQ ID NO: 17703 - protein, 12 aa, synthetic construct
  REGION 1..12: note = Description of Artificial Sequence: Synthetic peptide
NRFLYIIKLIFL

SEQ ID NO: 17704 - protein, 9 aa, synthetic construct
  REGION 1..9: note = Description of Artificial Sequence: Synthetic peptide
NSSRNSTPG

SEQ ID NO: 17705 - protein, 11 aa, synthetic construct
  REGION 1..11: note = Description of Artificial Sequence: Synthetic peptide
NTDHSSSSDNI

SEQ ID NO: 17706 - protein, 8 aa, synthetic construct
  REGION 1..8: note = Description of Artificial Sequence: Synthetic peptide
NVPLHGTI

SEQ ID NO: 17707 - protein, 10 aa, synthetic construct
  REGION 1..10: note = Description of Artificial Sequence: Synthetic peptide
NWITGGIAIA

SEQ ID NO: 17708 - protein, 10 aa, synthetic construct
  REGION 1..10: note = Description of Artificial Sequence: Synthetic peptide
PARMAGNGGD

SEQ ID NO: 17709 - protein, 11 aa, synthetic construct
  REGION 1..11: note = Description of Artificial Sequence: Synthetic peptide
PETNILLNVPL

SEQ ID NO: 17710 - protein, 8 aa, synthetic construct
  REGION 1..8: note = Description of Artificial Sequence: Synthetic peptide
PHVGEIPV

SEQ ID NO: 17711 - protein, 8 aa, synthetic construct
  REGION 1..8: note = Description of Artificial Sequence: Synthetic peptide
PKDHIGTR

SEQ ID NO: 17712 - protein, 8 aa, synthetic construct
  REGION 1..8: note = Description of Artificial Sequence: Synthetic peptide
PKEIIFLE

SEQ ID NO: 17713 - protein, 9 aa, synthetic construct
  REGION 1..9: note = Description of Artificial Sequence: Synthetic peptide
PKKDKKKKA

SEQ ID NO: 17714 - protein, 11 aa, synthetic construct
  REGION 1..11: note = Description of Artificial Sequence: Synthetic peptide
PKKDKKKKADE

SEQ ID NO: 17715 - protein, 10 aa, synthetic construct
  REGION 1..10: note = Description of Artificial Sequence: Synthetic peptide
PLLESELVIG

SEQ ID NO: 17716 - protein, 8 aa, synthetic construct
  REGION 1..8: note = Description of Artificial Sequence: Synthetic peptide
PPTEPKKD

SEQ ID NO: 17717 - protein, 9 aa, synthetic construct
  REGION 1..9: note = Description of Artificial Sequence: Synthetic peptide
PPTEPKKDK

SEQ ID NO: 17718 - protein, 8 aa, synthetic construct
  REGION 1..8: note = Description of Artificial Sequence: Synthetic peptide
PQGTTLPK

SEQ ID NO: 17719 - protein, 12 aa, synthetic construct
  REGION 1..12: note = Description of Artificial Sequence: Synthetic peptide
PQIAQFAPSASA

SEQ ID NO: 17720 - protein, 11 aa, synthetic construct
  REGION 1..11: note = Description of Artificial Sequence: Synthetic peptide
PSFLGRYMSAL

SEQ ID NO: 17721 - protein, 8 aa, synthetic construct
  REGION 1..8: note = Description of Artificial Sequence: Synthetic peptide
PTEPKKDK

SEQ ID NO: 17722 - protein, 9 aa, synthetic construct
  REGION 1..9: note = Description of Artificial Sequence: Synthetic peptide
PTEPKKDKK

SEQ ID NO: 17723 - protein, 8 aa, synthetic construct
  REGION 1..8: note = Description of Artificial Sequence: Synthetic peptide
PVAYRKVL

SEQ ID NO: 17724 - protein, 11 aa, synthetic construct
  REGION 1..11: note = Description of Artificial Sequence: Synthetic peptide
PYGANKDGIIW

SEQ ID NO: 17725 - protein, 11 aa, synthetic construct
  REGION 1..11: note = Description of Artificial Sequence: Synthetic peptide
QASSRSSSRSR

SEQ ID NO: 17726 - protein, 10 aa, synthetic construct
  REGION 1..10: note = Description of Artificial Sequence: Synthetic peptide
QGNFGDQELI

SEQ ID NO: 17727 - protein, 9 aa, synthetic construct
  REGION 1..9: note = Description of Artificial Sequence: Synthetic peptide
QGTTLPKGF

SEQ ID NO: 17728 - protein, 8 aa, synthetic construct
  REGION 1..8: note = Description of Artificial Sequence: Synthetic peptide
QLMCQPIL

SEQ ID NO: 17729 - protein, 9 aa, synthetic construct
  REGION 1..9: note = Description of Artificial Sequence: Synthetic peptide
QQGQTVTKK

SEQ ID NO: 17730 - protein, 10 aa, synthetic construct
  REGION 1..10: note = Description of Artificial Sequence: Synthetic peptide
QQQGQTVTKK

SEQ ID NO: 17731 - protein, 11 aa, synthetic construct
  REGION 1..11: note = Description of Artificial Sequence: Synthetic peptide
QQQQGQTVTKK

SEQ ID NO: 17732 - protein, 11 aa, synthetic construct
  REGION 1..11: note = Description of Artificial Sequence: Synthetic peptide
QRQKKQQTVTL

SEQ ID NO: 17733 - protein, 12 aa, synthetic construct
  REGION 1..12: note = Description of Artificial Sequence: Synthetic peptide
QRVAGDSGFAAY

SEQ ID NO: 17734 - protein, 9 aa, synthetic construct
  REGION 1..9: note = Description of Artificial Sequence: Synthetic peptide
QTVTLLPAA

SEQ ID NO: 17735 - protein, 12 aa, synthetic construct
  REGION 1..12: note = Description of Artificial Sequence: Synthetic peptide
QVILLNKHIDAY

SEQ ID NO: 17736 - protein, 9 aa, synthetic construct
  REGION 1..9: note = Description of Artificial Sequence: Synthetic peptide
RCDIKDLPK

SEQ ID NO: 17737 - protein, 12 aa, synthetic construct
  REGION 1..12: note = Description of Artificial Sequence: Synthetic peptide
RFLYIIKLIFLW

SEQ ID NO: 17738 - protein, 11 aa, synthetic construct
  REGION 1..11: note = Description of Artificial Sequence: Synthetic peptide
RGHLRIAGHHL

SEQ ID NO: 17739 - protein, 10 aa, synthetic construct
  REGION 1..10: note = Description of Artificial Sequence: Synthetic peptide
RGPEQTQGNF

SEQ ID NO: 17740 - protein, 12 aa, synthetic construct
  REGION 1..12: note = Description of Artificial Sequence: Synthetic peptide
RIGMEVTPSGTW

SEQ ID NO: 17741 - protein, 10 aa, synthetic construct
  REGION 1..10: note = Description of Artificial Sequence: Synthetic peptide
RINWITGGIA

SEQ ID NO: 17742 - protein, 11 aa, synthetic construct
  REGION 1..11: note = Description of Artificial Sequence: Synthetic peptide
RINWITGGIAI

SEQ ID NO: 17743 - protein, 12 aa, synthetic construct
  REGION 1..12: note = Description of Artificial Sequence: Synthetic peptide
RINWITGGIAIA

SEQ ID NO: 17744 - protein, 12 aa, synthetic construct
  REGION 1..12: note = Description of Artificial Sequence: Synthetic peptide
RLFARTRSMWSF

SEQ ID NO: 17745 - protein, 10 aa, synthetic construct
  REGION 1..10: note = Description of Artificial Sequence: Synthetic peptide
RMAGNGGDAA

SEQ ID NO: 17746 - protein, 11 aa, synthetic construct
  REGION 1..11: note = Description of Artificial Sequence: Synthetic peptide
RMAGNGGDAAL

SEQ ID NO: 17747 - protein, 11 aa, synthetic construct
  REGION 1..11: note = Description of Artificial Sequence: Synthetic peptide
RNPANNAAIVL

SEQ ID NO: 17748 - protein, 11 aa, synthetic construct
  REGION 1..11: note = Description of Artificial Sequence: Synthetic peptide
RNRFLYIIKLI

SEQ ID NO: 17749 - protein, 12 aa, synthetic construct
  REGION 1..12: note = Description of Artificial Sequence: Synthetic peptide
RNRFLYIIKLIF

SEQ ID NO: 17750 - protein, 10 aa, synthetic construct
  REGION 1..10: note = Description of Artificial Sequence: Synthetic peptide
RPLLESELVI

SEQ ID NO: 17751 - protein, 12 aa, synthetic construct
  REGION 1..12: note = Description of Artificial Sequence: Synthetic peptide
RPLLESELVIGA

SEQ ID NO: 17752 - protein, 11 aa, synthetic construct
  REGION 1..11: note = Description of Artificial Sequence: Synthetic peptide
RQKKQQTVTLL

SEQ ID NO: 17753 - protein, 12 aa, synthetic construct
  REGION 1..12: note = Description of Artificial Sequence: Synthetic peptide
RQKRTATKAYNV

SEQ ID NO: 17754 - protein, 12 aa, synthetic construct
  REGION 1..12: note = Description of Artificial Sequence: Synthetic peptide
RSMWSFNPETNI

SEQ ID NO: 17755 - protein, 11 aa, synthetic construct
  REGION 1..11: note = Description of Artificial Sequence: Synthetic peptide
RSSSRSRNSSR

SEQ ID NO: 17756 - protein, 12 aa, synthetic construct
  REGION 1..12: note = Description of Artificial Sequence: Synthetic peptide
SAAEASKKPRQK

SEQ ID NO: 17757 - protein, 11 aa, synthetic construct
  REGION 1..11: note = Description of Artificial Sequence: Synthetic peptide
SAFFGMSRIGM

SEQ ID NO: 17758 - protein, 12 aa, synthetic construct
  REGION 1..12: note = Description of Artificial Sequence: Synthetic peptide
SAFFGMSRIGME

SEQ ID NO: 17759 - protein, 11 aa, synthetic construct
  REGION 1..11: note = Description of Artificial Sequence: Synthetic peptide
SELVIGAVILR

SEQ ID NO: 17760 - protein, 11 aa, synthetic construct
  REGION 1..11: note = Description of Artificial Sequence: Synthetic peptide
SEVGPEHSLAE

SEQ ID NO: 17761 - protein, 9 aa, synthetic construct
  REGION 1..9: note = Description of Artificial Sequence: Synthetic peptide
SMWSFNPET

SEQ ID NO: 17762 - protein, 11 aa, synthetic construct
  REGION 1..11: note = Description of Artificial Sequence: Synthetic peptide
SMWSFNPETNI

SEQ ID NO: 17763 - protein, 10 aa, synthetic construct
  REGION 1..10: note = Description of Artificial Sequence: Synthetic peptide
SSRGTSPARM

SEQ ID NO: 17764 - protein, 9 aa, synthetic construct
  REGION 1..9: note = Description of Artificial Sequence: Synthetic peptide
SSRNSTPGS

SEQ ID NO: 17765 - protein, 11 aa, synthetic construct
  REGION 1..11: note = Description of Artificial Sequence: Synthetic peptide
SSRNSTPGSSR

SEQ ID NO: 17766 - protein, 12 aa, synthetic construct
  REGION 1..12: note = Description of Artificial Sequence: Synthetic peptide
SYFIASFRLFAR

SEQ ID NO: 17767 - protein, 11 aa, synthetic construct
  REGION 1..11: note = Description of Artificial Sequence: Synthetic peptide
TATKAYNVTQA

SEQ ID NO: 17768 - protein, 12 aa, synthetic construct
  REGION 1..12: note = Description of Artificial Sequence: Synthetic peptide
TDHSSSSDNIAL

SEQ ID NO: 17769 - protein, 8 aa, synthetic construct
  REGION 1..8: note = Description of Artificial Sequence: Synthetic peptide
TDPSFLGR

SEQ ID NO: 17770 - protein, 10 aa, synthetic construct
  REGION 1..10: note = Description of Artificial Sequence: Synthetic peptide
TDPSFLGRYM

SEQ ID NO: 17771 - protein, 10 aa, synthetic construct
  REGION 1..10: note = Description of Artificial Sequence: Synthetic peptide
TDVFYKENSY

SEQ ID NO: 17772 - protein, 9 aa, synthetic construct
  REGION 1..9: note = Description of Artificial Sequence: Synthetic peptide
TEGALNTPK

SEQ ID NO: 17773 - protein, 9 aa, synthetic construct
  REGION 1..9: note = Description of Artificial Sequence: Synthetic peptide
TEPKKDKKK

SEQ ID NO: 17774 - protein, 8 aa, synthetic construct
  REGION 1..8: note = Description of Artificial Sequence: Synthetic peptide
TGAIKLDD

SEQ ID NO: 17775 - protein, 8 aa, synthetic construct
  REGION 1..8: note = Description of Artificial Sequence: Synthetic peptide
TGGIAIAM

SEQ ID NO: 17776 - protein, 11 aa, synthetic construct
  REGION 1..11: note = Description of Artificial Sequence: Synthetic peptide
TGPEAGLPYGA

SEQ ID NO: 17777 - protein, 8 aa, synthetic construct
  REGION 1..8: note = Description of Artificial Sequence: Synthetic peptide
TILTRPLL

SEQ ID NO: 17778 - protein, 9 aa, synthetic construct
  REGION 1..9: note = Description of Artificial Sequence: Synthetic peptide
TILTRPLLE

SEQ ID NO: 17779 - protein, 8 aa, synthetic construct
  REGION 1..8: note = Description of Artificial Sequence: Synthetic peptide
TIQPRVEK

SEQ ID NO: 17780 - protein, 12 aa, synthetic construct
  REGION 1..12: note = Description of Artificial Sequence: Synthetic peptide
TITVEELKKLLE

SEQ ID NO: 17781 - protein, 10 aa, synthetic construct
  REGION 1..10: note = Description of Artificial Sequence: Synthetic peptide
TKAYNVTQAF

SEQ ID NO: 17782 - protein, 12 aa, synthetic construct
  REGION 1..12: note = Description of Artificial Sequence: Synthetic peptide
TLACFVLAAVYR

SEQ ID NO: 17783 - protein, 11 aa, synthetic construct
  REGION 1..11: note = Description of Artificial Sequence: Synthetic peptide
TLLPAADLDDF

SEQ ID NO: 17784 - protein, 8 aa, synthetic construct
  REGION 1..8: note = Description of Artificial Sequence: Synthetic peptide
TLPKGFYA

SEQ ID NO: 17785 - protein, 9 aa, synthetic construct
  REGION 1..9: note = Description of Artificial Sequence: Synthetic peptide
TLSYYKLGA

SEQ ID NO: 17786 - protein, 9 aa, synthetic construct
  REGION 1..9: note = Description of Artificial Sequence: Synthetic peptide
TNILLNVPL

SEQ ID NO: 17787 - protein, 11 aa, synthetic construct
  REGION 1..11: note = Description of Artificial Sequence: Synthetic peptide
TPGSSRGTSPA

SEQ ID NO: 17788 - protein, 11 aa, synthetic construct
  REGION 1..11: note = Description of Artificial Sequence: Synthetic peptide
TPKDHIGTRNP

SEQ ID NO: 17789 - protein, 10 aa, synthetic construct
  REGION 1..10: note = Description of Artificial Sequence: Synthetic peptide
TQALPQRQKK

SEQ ID NO: 17790 - protein, 8 aa, synthetic construct
  REGION 1..8: note = Description of Artificial Sequence: Synthetic peptide
TRNPANNA

SEQ ID NO: 17791 - protein, 12 aa, synthetic construct
  REGION 1..12: note = Description of Artificial Sequence: Synthetic peptide
TRNPANNAAIVL

SEQ ID NO: 17792 - protein, 10 aa, synthetic construct
  REGION 1..10: note = Description of Artificial Sequence: Synthetic peptide
TSRTLSYYKL

SEQ ID NO: 17793 - protein, 11 aa, synthetic construct
  REGION 1..11: note = Description of Artificial Sequence: Synthetic peptide
TSRTLSYYKLG

SEQ ID NO: 17794 - protein, 12 aa, synthetic construct
  REGION 1..12: note = Description of Artificial Sequence: Synthetic peptide
TTDPSFLGRYMS

SEQ ID NO: 17795 - protein, 9 aa, synthetic construct
  REGION 1..9: note = Description of Artificial Sequence: Synthetic peptide
TTLPKGFYA

SEQ ID NO: 17796 - protein, 9 aa, synthetic construct
  REGION 1..9: note = Description of Artificial Sequence: Synthetic peptide
TVATSRTLS

SEQ ID NO: 17797 - protein, 11 aa, synthetic construct
  REGION 1..11: note = Description of Artificial Sequence: Synthetic peptide
VATEGALNTPK

SEQ ID NO: 17798 - protein, 11 aa, synthetic construct
  REGION 1..11: note = Description of Artificial Sequence: Synthetic peptide
VEELKKLLEQW

SEQ ID NO: 17799 - protein, 8 aa, synthetic construct
  REGION 1..8: note = Description of Artificial Sequence: Synthetic peptide
VGEIPVAY

SEQ ID NO: 17800 - protein, 10 aa, synthetic construct
  REGION 1..10: note = Description of Artificial Sequence: Synthetic peptide
VGEIPVAYRK

SEQ ID NO: 17801 - protein, 8 aa, synthetic construct
  REGION 1..8: note = Description of Artificial Sequence: Synthetic peptide
VGLMWLSY

SEQ ID NO: 17802 - protein, 11 aa, synthetic construct
  REGION 1..11: note = Description of Artificial Sequence: Synthetic peptide
VIGAVILRGHL

SEQ ID NO: 17803 - protein, 9 aa, synthetic construct
  REGION 1..9: note = Description of Artificial Sequence: Synthetic peptide
VILLNKHID

SEQ ID NO: 17804 - protein, 10 aa, synthetic construct
  REGION 1..10: note = Description of Artificial Sequence: Synthetic peptide
VLAAVYRINW

SEQ ID NO: 17805 - protein, 10 aa, synthetic construct
  REGION 1..10: note = Description of Artificial Sequence: Synthetic peptide
VPLHGTILTR

SEQ ID NO: 17806 - protein, 9 aa, synthetic construct
  REGION 1..9: note = Description of Artificial Sequence: Synthetic peptide
VTKKSAAEA

SEQ ID NO: 17807 - protein, 10 aa, synthetic construct
  REGION 1..10: note = Description of Artificial Sequence: Synthetic peptide
VTLLPAADLD

SEQ ID NO: 17808 - protein, 8 aa, synthetic construct
  REGION 1..8: note = Description of Artificial Sequence: Synthetic peptide
VTQAFGRR

SEQ ID NO: 17809 - protein, 8 aa, synthetic construct
  REGION 1..8: note = Description of Artificial Sequence: Synthetic peptide
WPVTLACF

SEQ ID NO: 17810 - protein, 11 aa, synthetic construct
  REGION 1..11: note = Description of Artificial Sequence: Synthetic peptide
WSFNPETNILL

SEQ ID NO: 17811 - protein, 11 aa, synthetic construct
  REGION 1..11: note = Description of Artificial Sequence: Synthetic peptide
YAEGSRGGSQA

SEQ ID NO: 17812 - protein, 11 aa, synthetic construct
  REGION 1..11: note = Description of Artificial Sequence: Synthetic peptide
YANRNRFLYII

SEQ ID NO: 17813 - protein, 11 aa, synthetic construct
  REGION 1..11: note = Description of Artificial Sequence: Synthetic peptide
YFYYLGTGPEA

SEQ ID NO: 17814 - protein, 9 aa, synthetic construct
  REGION 1..9: note = Description of Artificial Sequence: Synthetic peptide
YGANKDGII

SEQ ID NO: 17815 - protein, 10 aa, synthetic construct
  REGION 1..10: note = Description of Artificial Sequence: Synthetic peptide
YGANKDGIIW

SEQ ID NO: 17816 - protein, 11 aa, synthetic construct
  REGION 1..11: note = Description of Artificial Sequence: Synthetic peptide
YIIKLIFLWLL

SEQ ID NO: 17817 - protein, 9 aa, synthetic construct
  REGION 1..9: note = Description of Artificial Sequence: Synthetic peptide
YKLGASQRV

SEQ ID NO: 17818 - protein, 8 aa, synthetic construct
  REGION 1..8: note = Description of Artificial Sequence: Synthetic peptide
YLGTGPEA

SEQ ID NO: 17819 - protein, 9 aa, synthetic construct
  REGION 1..9: note = Description of Artificial Sequence: Synthetic peptide
YLGTGPEAG

SEQ ID NO: 17820 - protein, 12 aa, synthetic construct
  REGION 1..12: note = Description of Artificial Sequence: Synthetic peptide
YLGTGPEAGLPY

SEQ ID NO: 17821 - protein, 10 aa, synthetic construct
  REGION 1..10: note = Description of Artificial Sequence: Synthetic peptide
YRINWITGGI

SEQ ID NO: 17822 - protein, 12 aa, synthetic construct
  REGION 1..12: note = Description of Artificial Sequence: Synthetic peptide
YRINWITGGIAI

SEQ ID NO: 17823 - protein, 10 aa, synthetic construct
  REGION 1..10: note = Description of Artificial Sequence: Synthetic peptide
YSRYRIGNYK

SEQ ID NO: 17824 - protein, 10 aa, synthetic construct
  REGION 1..10: note = Description of Artificial Sequence: Synthetic peptide
YYKLGASQRV

SEQ ID NO: 17825 - protein, 1272 aa, synthetic construct
  REGION 1..1272: note = Synthetic
MFVFLVLLPLVSSQCVNLTTRTQLPPAYTNSFTRGVYYPDKVFRSSVLHSTQDLFLPFFSNVTWFHAIHVSGTNGTKRFDNPVLPFNDGVYFASTEKSNIIRGWIFGTTLDSKTQSLLIVNNATNVVIKVCEFQFCNDPFLGVYYHKNNKSWMESEFRVYSSANNCTFEYVSQPFLMDLEGKQGNFKNLREFVFKNIDGYFKIYSKHTPINLVRDLPQGFSALEPLVDLPIGINITRFQTLLALHRSYLTPGDSSSGWTAGAAAYYVGYLQPRTFLLKYNENGTITDAVDCALDPLSETKCTLKSFTVEKGIYQTSNFRVQPTESIVRFPNITNLCPFGEVFNATRFASVYAWNRKRISNCVADYSVLYNSASFSTFKCYGVSPTKLNDLCFTNVYADSFVIRGDEVRQIAPGQTGKIADYNYKLPDDFTGCVIAWNSNNLDSKVGGNYNYLYRLFRKSNLKPFERDISTEIYQAGSTPCNGVEGFNCYFPLQSYGFQPTNGVGYQPYRVVVLSFELLHAPATVCGPKKSTNLVKNKCVNFNFNGLTGTGVLTESNKKFLPFQQFGRDIADTTDAVRDPQTLEILDITPCSFGGVSVITPGTNTSNQVAVLYQDVNCTEVPVAIHADQLTPTWRVYSTGSNVFQTRAGCLIGAEHVNNSYECDIPIGAGICASYQTQTNSPRRARSVASQSIIAYTMSLGAENSVAYSNNSIAIPTNFTISVTTEILPVSMTKTSVDCTMYICGDSTECSNLLLQYGSFCTQLNRALTGIAVEQDKNTQEVFAQVKQIYKTPPIKDFGGFNFSQILPDPSKPSKRSFIEDLLFNKVTLADAGFIKQYGDCLGDIAARDLICAQKFNGLTVLPPLLTDEMIAQYTSALLAGTITSGWTFGAGAALQIPFAMQMAYRFNGIGVTQNVLYENQKLIANQFNSAIGKIQDSLSSTASALGKLQDVVNQNAQALNTLVKQLSSNFGAISSVLNDILSRLDKVEAEVQIDRLITGRLQSLQTYVTQQLIRAAEIRASANLAATKMSECVLGQSKRVDFCGKGYHLMSFPQSAPHGVVFLHVTYVPAQEKNFTTAPAICHDGKAHFPREGVFVSNGTHWFVTQRNFYEPQIITTDNTFVSGNCDVIGIVNNTVYDPLQPELDSFKEELDKYFKNHTSPDVDLGDISGINASVVNIQKEIDRLNEVAKNLNESLIDLQELGKYEQYIKWPWYIWLGFIAGLIAIVMVTIMLCCMTSCCSCLKGCCSCGSCCKFDEDDSEPVLKGVKLHYT

SEQ ID NO: 17826 - protein, 8 aa, synthetic construct
  REGION 1..8: note = Synthetic
VNFNFNGL

SEQ ID NO: 17827 - DNA, 2577 bp, synthetic construct
  misc_feature 1..2577: note = Synthetic
  source 1..2577: mol_type = other DNA
atgagagtgatggcccccagaaccctgatcctgctgctgtctggcgccctggccctgacagagacatgggccggaagcggcggctctggaggaggcggctccggaggcaaagatctgagcccaagatggtacttttactacctgggaacaggacctgaagctggactgccttatggagcaaataaagatggaatcatctgggtggcaacagaaggagcactgaatacaccaaaagatcacattggaaccagaaatccagcaaataatgcagcaatcgtgctgcagctgccacagggaacaacactgccaaaaggattttacgcagaaggaagcagaggaggaagccaggcaagcagcagaagcagcagcagaagcagaaatagcagcagaaatagcacacctggaagcagcagaggaacaagccctgcaagaatggcaggaaatggaggagatgcagcactggcactgctgctgctggatagactgaatcagctggaaagcaaaatgagcggaaaaggacagcagcagcagggacagacagtgacaaagaaaagcgctgctgaagcttccaagaaaccaagacagaaaagaacagcaacaaaagcatacaatgtgacacaggcatttggaaggagaggacctgaacagacccagggaaattttggagatcaggaactgatcagacagggaaccgattacaaacactggcctcagattgctcagtttgctccttctgcttctgctttctttggaatgtccagaattggaatggaagtgacaccttctggaacatggctgacatacacaggagcaatcaaactggatgataaagatccaaattttaaagatcaggtgattctgctgaataaacacattgatgcttacaaaacatttccaccaacagaaccaaagaaagataaaaagaagaaagctgatgaaacacaggctctgcctcagagacagaagaaacagcagacagtgacactgctgcctgctgctgatctggatgatttttccaaacagctgcagcagtccatgtcctccgctgattccacacaggcttttagagcttgcatggtgacaaacaacacatttacactgaaagtgcctcatgtgggagaaattcctgtggcttacagaaaagtgctgctgaaaacaattcaaccaagagtggaaaaatacctgtttgatgaatctggagaatttaaactttctgaagtgggacctgaacactctcttgctgaatactacattttctttgcttctttttactataaaagatgttttcacacaactgatccatcttttctgggaagatacatgtctgctctttttgctgatgatttaaatcagttaacaggatatcacacagatttttcttctgaaatcattggataccagttgatgtgtcaaccaattttgttgggtgaagcagaattggcaaaaaacgtgtctttgattcttggaacagtttcttggaatcttaaaaagagatacttattatctgctggaatttttggagctatcacagatgtgttttacaaagaaaactcatacaaagtgccaacagacaattacataacaacatacgccagaatggctgctccaaaagaaatcatcttccttgaaggagaaacactttttggagatgatacagtgattgaagtggcaattattctggcatctttttctgcatccacaagaagatctggagctgattccaatggaacaattacagtggaagaactgaaaaagctgctggaacagtggaatctggtgattggatttctgtttctgacatggatttgtctgctgcagtttgcttacgctaatagaaatagatttctgtacattattaaactgatttttctgtggctgctgtggcctgtgacactggcttgctttgtgctggctgctgtgtacagaattaattggattacaggaggaattgcaattgcaatggcatgcctggtgggactgatgtggctgtcttactttattgcttcttttagactgtttgcaagaacaagatctatgtggtcttttaatcctgaaacaaatattctgctgaatgtgcctctgcacggaacaattctgacaagacctctgctggaatctgaactggtgattggagctgtgattctgagaggacacctgagaattgctggacaccacctgggaagatgcgatattaaagatctgccaaaagaaattacagtggcaacaagcagaacactgagctactacaaactgggagcttcccaaagagtggctggagatagcggatttgctgcttacagcagatacagaattggaaattacaaactgaataccgatcacagctcatcttctgataatattgctctgctggtgcagggtggttctcttggcggagggggttcgggaatcgtgggaattgtggcaggactggcagtgctggccgtggtggtgatcggagccgtggtggctaccgtgatgtgcagacggaagtccagcggaggcaagggcggcagctacagccaggccgccagctctgatagcgcccagggcagcgacgtgtcactgacagcctagtaa

SEQ ID NO: 17828 - DNA, 1521 bp, synthetic construct
  misc_feature 1..1521: note = Synthetic
  source 1..1521: mol_type = other DNA
atgagagtgatggcccccagaaccctgatcctgctgctgtctggcgccctggccctgacagagacatgggccggaagcggcggctctggaggaggcggctccggaggcagaatggctggaaatggaggagatgctgctctggctctgctgctgctggatagactgaatcagctggaatcaaaaatgtctggaaaaggacagcaacagatgagagcttgcatggtgacaaacaacacatttacactgaaagtgcctcatgtgggagaaattcctgtggcttacagaaaagtgctgctgaaaacaattcaaccaagagtggaaaaatacctgtttgatgaatctggagaatttaaactttctgaagtgggacctgaacactctcttgctgaatacaaaatgtgcggatacaaacactggcctcagattgctcagtttgctccttctgcttctgctttctttggaatgagcagaattggaatggaagtgacaccttctggaacatggctgacatacacaggagcaatcaaactggatgataaagatccaaactttaaagatcaggtgattctgctgaacaaacacattgatgcttacaaaacatttcctgctagatgtgctacaactgatccttcttttctgggaagatacatgtctgctctttttgctgatgatttaaatcagttaacaggatatcacacagatttttcttctgaaatcattggataccagttgatgtgtcaaccaattttgttgggtgaagcagaattggcaaaaaacgtgtctttgattcttggaacagtttcttggaatcttaaaaaacaaggatttgcatacgcaaatagaaatagatttctgtacattattaaactgatttttctgtggctgctgtggcctgtgacactggcttgctttgtgctggctgctgtgtacagaataaattggataacaggaggaattgcaattgcaatggcatgcttggtgggattgatgtggttgtcttactttattgcttcttttagactgttttacagatcctacttattatctgctggaatttttggagctatcacagatgtgttttacaaagaaaactcatacaaagtgccaacagacaattacataacaacatacgctagaatggctgctccaaaagaaatcatcttccttgaaggagaaacactttttggagatgatacagtgattgaagtgtccatgtttaatctgggaagatgcgatattaaagatctgccaaaagaaattacagtggcaacaagcagaacactgagctactacaaactgggagcaagccagagagtggcaggtggttctcttggcggagggggttcgggaatcgtgggaattgtggcaggactggcagtgctggccgtggtggtgatcggagccgtggtggctaccgtgatgtgcagacggaagtccagcggaggcaagggcggcagctacagccaggccgccagctctgatagcgcccagggcagcgacgtgtcactgacagcctagtaa

SEQ ID NO: 17829 - DNA, 1536 bp, synthetic construct
  misc_feature 1..1536: note = Synthetic
  source 1..1536: mol_type = other DNA
ggcggctctggaggaggcggctccggaggctctcctgccagaatggctggaaatggaggagatgctgctctggctctgctgctgctggatagactgaatcagctggaaagcaaaatgagcggaaaaggacagcagcagcagggacaaacagtgacaaagaaatctgctgctgaagccagcaagaaaccaagacagaaaagaacagccacaaaagcctacaatgtgacacaggcctttggaagaaggggacctgaacagacacagggaaattttggagatcaggaactgatcagacagggaacagattacaaacactggcctcagatcgcccagtttgccccatctgcctctgccttctttggaatgagcagaattggaatggaagtgacaccttctggaacatggctgacatacacaggagccatcaaactggatgataaagatccaaattttaaagatcaggtgattctgctgaataaacacattgatgcctacaaaacatttccaccaacagaaccaaagaaagataaattcaaagctgctatggtgacaaacaacacatttacactgaaagtgcctcatgtgggagaaattcctgtggcttacagaaaagtgctgctgaaaacaattcaaccaagagtggaaaaatacctgtttgatgaatctggagaatttaaactttctgaagtgggacctgaacactctcttgctgaatactacattttctttgcttctttttactataagaggaatggatttgcatacgcaaatagaaatagatttctgtacattattaaactgatttttctgtggctgctgtggcctgtgacactggcttgctttgtgctggctgctgtgtacagaataaattggataacaggaggaattgcaattgcaatggcatgcttggtgggattgatgtggttgtcttactttattgcttcttttagactgttttacaactcttttcacacaactgatccatcttttctgggaagatacatgtctgctctttttgctgatgatttaaatcagttaacaggatatcacacagatttttcttctgaaatcattggataccagttgatgtgtcaaccaattttgttgggtgaagcagaattggcaaaaaacgtgtctttgattcttggaacagtttcttggaatcttaagaaaaacggactgggaagatgcgatattaaagatctgccaaaagaaattacagtggcaacaagcagaacactgagctactacaaactgggagcaagccagagagtggcatacagatcctacttattatctgctggaatttttggagctatcacagatgtgttttacaaagaaaactcatacaaagtgccaacagacaattacataacaacatacgctagaatggctgctccaaaagaaatcatcttccttgaaggagaaacactttttggagatgatacagtgattgaagtggcaattattctggcatctttttctgcatccacaagaagaaggggaggtggttctcttggcggagggggttcggga

SEQ ID NO: 17830 - DNA, 13 bp, synthetic construct
  misc_feature 1..13: note = Synthetic
  source 1..13: mol_type = other DNA
agaataaactagt

SEQ ID NO: 17831 - protein, 512 aa, synthetic construct; identical to SEQ ID NO: 17494
  REGION 1..512: note = Synthetic

SEQ ID NO: 17832 - DNA, 1536 bp, synthetic construct; identical to SEQ ID NO: 17505
  misc_feature 1..1536: note = Synthetic
  source 1..1536: mol_type = other DNA

SEQ ID NO: 17833 - DNA, 1764 bp, synthetic construct
  misc_feature 1..1764: note = Synthetic
  source 1..1764: mol_type = other DNA
atgagagtgatggcccccagaaccctgatcctgctgctgtctggcgccctggccctgacagagacatgggccggaagcggcggctctggaggaggcggctccggaggctctcctgccagaatggctggaaatggaggagatgctgctctggctctgctgctgctggatagactgaatcagctggaaagcaaaatgagcggaaaaggacagcagcagcagggacaaacagtgacaaagaaatctgctgctgaagccagcaagaaaccaagacagaaaagaacagccacaaaagcctacaatgtgacacaggcctttggaagaaggggacctgaacagacacagggaaattttggagatcaggaactgatcagacagggaacagattacaaacactggcctcagatcgcccagtttgccccatctgcctctgccttctttggaatgagcagaattggaatggaagtgacaccttctggaacatggctgacatacacaggagccatcaaactggatgataaagatccaaattttaaagatcaggtgattctgctgaataaacacattgatgcctacaaaacatttccaccaacagaaccaaagaaagataaatttagagcttgcatggtgacaaacaacacatttacactgaaagtgcctcatgtgggagaaattcctgtggcttacagaaaagtgctgctgaaaacaattcaaccaagagtggaaaaatacctgtttgatgaatctggagaatttaaactttctgaagtgggacctgaacactctcttgctgaatactacattttctttgcttctttttactataaaagatgttttcacacaactgatccatcttttctgggaagatacatgtctgctctttttgctgatgatttaaatcagttaacaggatatcacacagatttttcttctgaaatcattggataccagttgatgtgtcaaccaattttgttgggtgaagcagaattggcaaaaaacgtgtctttgattcttggaacagtttcttggaatcttaaaaagagatacttattatctgctggaatttttggagctatcacagatgtgttttacaaagaaaactcatacaaagtgccaacagacaattacataacaacatacgccagaatggctgctccaaaagaaatcatcttccttgaaggagaaacactttttggagatgatacagtgattgaagtggcaattattctggcatctttttctgcatccacaagaagaaggggaaaactgctggaacagtggaatcttgtgattggatttaatagaaatagatttctttacattattaaattgatttttctttggcttctttggcctgtgacacttgcttgctttgtgcttgctgctgtgtactctgaactggtgattggagctgtgattctgagaggacacctgagaattgctggacaccacctgggaagaacagtggcaacatcaagaacactttcttactacaaactgggagcttctcagagagtgaaaagatactctggcctgatgtggctgagctactttgctagatatgctggtggttctcttggcggagggggttcgggaatcgtgggaattgtggcaggactggcagtgctggccgtggtggtgatcggagccgtggtggctaccgtgatgtgcagacggaagtccagcggaggcaagggcggcagctacagccaggccgccagctctgatagcgcccagggcagcgacgtgtcactgacagcctagtaa
